United States Patent Application Publication US 2025/0325599 A1 - sequence listing, part 4

SEQ ID NO: 2 - DNA, 4189194 bp, Clostridium difficile (residues 2,094,598-4,189,194 of 4,189,194)
  source 1..4189194: mol_type = genomic DNA
ggaattataccgaccctgaaaccgctgtttttggagtagcttttcatgcttttgagtggctatttgtcagattagtaccgattgtccttataggagcaattattggaatctttttgacacgtaagaaaatatgaagtaactctgctttttataatatagcaagcgttccttaaaagtgtcattctacatggcaatcgaggacaactatgtaaggaagaacctttttgatttccaactaagcgaagttattgaggacgccagtaggcccaaaaccgcattaagtaaagtacaggaagcaagactgctggacttatactctcatgcgtcagatgcagaaaatgcgaggtctgtagcatgatttacaacgatttgtacaacgactacgagtagaaatatatggagataagtattatctacgaaatcagaaaagaaatgacttgataatttactcatgttataattattgatgtgaaattaataaatcgaaattccttttttagatttaacaatactgagtaaggaaaaagtgaatgacttttgcaaggaggtgttaatatcaggcaaataaagtcttttgtttttccagttatatccttaatattcttagatcaaattagcaaagttcttataggattattcttaatggactttgaaattgatataattgggaaatttttaagattcaatcctgttcaaaatacaaaattaagtctctgctatctaacaaacggagcacaaaaatgaaaattaaatattaaatataaagcacagttaattttgattaaaaagttgactgtcttttcttttttataaatttaagcatgggtaataaagaaatgactgcatttaagcattatgtatataattggaggcaataaaaagccagcaaagcccataaaatagagctgtgctagcaacatgatgagttataagaagataatcaaaagcttacgctttattttaatttaaaaaaatgattactgtaaagaaatcattttttattataatcactgatacatcaaatattctaaataaaatttttatttatctggaattgtatattttttctataatattaactacagcgtacattgcccaagcacaaatagccaatacaaatactcccatcattactaaatctaatttaaatacttgagaaccatatactatcaagtagcctattccatatcttgaaactaaaaattctccaactattacacctacccatgccataccaatattaattttagttaaatttattaaatttcctgtgtttgcaggtaatatgagtttaaataatatttgagatttagtagctccaaagctttttaacatcttaattttttcttcatctatattcataaaataattataagctgaaagtatagtaacaacaacagaaatcgttacagctgttacgacgattccttctattccagcacctacccaaactataattataggagctaaagcagtcttaggaagagcatttaaaactaccaaaaatgggtctaatatttttgataatttttctgaccaccaaagagcaattgctaccaaaatacctaatacagtacctataacaagaccaagaacagtttcatatacagatattccaatatgtttaaataattgaccactaaatgcatattgaataaataaattgtaaatatcacttggtttgctaaatagaaatgtatttataacatttaagtcagctaaaagttcccagattacaataaaaccaattaaaattaatagctggtagaataatacatttcttttttctctttttacacctttaacatagtttatatatccttcagatcttttattaagcctcatgtgtatctagctccttccataatatgtcgaaatacttttgaaaatcaggaactttacgtgttttgagaggcgtttttgttccatccatgttaagttcaatatcgtaaatattttttatggtagctggtcttttagatagtattgcaaccttatctgatatgcttattgcttctgctatagctaaaaaagtgcaactaattgcttaaagaaacagaattatccacttcagcacccatataaacaatattaagatttcctaaactgctatcccaaatgatactattaataatagtagataataacaatctcttatcatctaaactggcattatcaacttcatcattaaatctcttcaaattactaacaataatatcaatattaatactgtcactactaatattgatattactagattccaaaatattaatcttatcctttaaaatactaatctcattatttaggctctcaatctgggaaactatataatcagaagcagtactaccagtattttttgcaagctctataactaaatttttaataagtctttccttatctaaaatttgatttttaagtaaattagtctcagatttaaaaatattaaaaacattatcagtcttaatgttattactattgaatgcacttataatagactcttctttacaattcttaattttatctataactaaactttcaactaatggaccattaagatttttacagttgcaactatcagacccaagtgtttttttagtaccacaaatataataatactttaaatccttgtcagtttttttgcctttataggtaattctcatattagaaccacatttaccacattttataagaccagataaaagagcagtttttccagttgatatccttggagttttatcacgatttttatctaattgattttgtacttcaagccatatttcaggttctatgactccatggtgttttgcaattgctgctattgagttagatgtatttttagcataggtaaggattccacattttctatctggagtacctacaacatccataccactatttttaaggtaatctaaaatttcatcattagcttttacatatgctggatttctaagtattctagataaagaactagggtcaaatttaccaccacgaggaccccttattccattattatagacatatttatataacttagataaggacctaagttctaaatatttattgtatattagctttacaatctccatttgttcatcatttacttgaagcttatacatacttctttcttttagattttcatctaagaatgtgattttttcactgttgaatccatgaggtgtattgcctccaagccatctaccactacgggctaattcatacatgttgtcttttatacgttctgctattgtttctctttctaattgagcaaatacacttgatataaacatcatagctcttcccattggagttgaagtatcaaattgttctttgatagatataaatgatatgtttagttcatttaatttttctattaaagtagagaagtcagatacatttctcgatatcctatctaatctataacaaactaggtaactaaatttcttatctttagcatcctgcatcattttcttaaattgtggtctatctatattgctaccactaaatccctcatcttcatatatcaaaaaatcttttacaccaatagactttgcataatcaatacataattgtatttgattttctatagaatcaccttttccagtaaatcttgattttcttgaataaattgcagctttcaaaattaaaacctcctataaattaggatatatatttgaaattatttatatacaaccttttaagtaaacttattagaataaatttattaattaggtaaatttatataattctactttttataatatatgactatttattttatttctttactattcaagttctaaatcaataataaattttgatatttaattgtatcaggacaaatctctaatttcatatattattaatataaaatcataggttagtgtgaaaaagttgaaatttaaatattttaaaagataattttttggaactaataggtataacaaaaatttatagggggattgcatatggaaatcaatgttatagaaattttccctaaagataaagctaaacttaataaaatagaaatggataaagctagttggtttgtaaatataataagtaaaaaatatcctaaagaagctttaaatgaagcatttagtattttagaaaaagaattaaatataagtaaagctaatacataagctttgattattgattttatatactattggttttatacgctatgacttgacattatattaatcaaatagtatatttttaaatatagcacaatgaagtgttaaaagagcaatggagctccatagataaagtctatggagcttttttgcgtatttaacttaaggaggatagagctttgaataactttgagattaaaactagaataaaatttggagaaggttcactaaaagttttgcaagaattaaaaaacaaaaatgtattaataataacagacccttttatggtgaaatcaaaaacaatagataaaataacatctaatttaataaactcaacatatcaagtttttgaagaaatagtaccagacccaccaatagaagtagtagtagcaggaatagaagcatttaaatctataaatccagacgtaataatagcattaggtggtggttctgcaatagatgcagcaaaatctataatggacttttctaaaaaaatattaaaaattaacgaagtagagtttatagcaataccaacaacaagtggaacaggttcagaagtaacatcatttgctgtaataacagatagtcaaaaaaaatgtaagtatccattagtgagtgatgatttacttccagatatggcaatactagacccagagcttgtaaaaactgtaccaaattttataacagcagatacagggatggatgtattgacacatgctatagaagcttacgtatctacaaattctaatgacttttcagatgcactagctgaaaaatctataaagttagtatttaaatacttaataaaagcatataaagatggaaatgacatagaagctcgagaaaaaatgcacaatgcatcttgtttagcaggtatggcatttaaccaagcatcacttggcataaatcattctattgcacatgtattaggtggaaaattccatataccacatggaagaacaaattctatattacttcctcatgtaatagaatataattcatcaatagtaggatatactaacacaacttactctgatacagctaaaaaatatgcacaaatagcagaattagtaggacttgggagtgctaatataagaatatctgttagaaatttagtaaatgaaataaagaaactacaaaaagaaatgaatatgccaactaaattgacacaatgcaaattaagtttagaagatataactaatgaagaaagagaaatagcaaaacttgctataaaagatacttgtacattaactaatcctaaggtaccaactgaagatgatataataaacatattaaataacattaaataactacattttattacatgtaaatataatattatacaaatagggaaaatgtttttaaaaatataaattatatattgacaaatataaaacataaaactataatgaaagtatcacaaaggcgtgatactttagtagaaagcaatggagcttcttaggaatattaatattattcttatggagctccttttattttaagcaaatagctttttaataaactatattcaaagaaagcagggaataaatttgactgaagaatctaagcaaagagttattcaagaatatgttcctggaaaacaggttacattagcacatatcatagctaaccctaatgaagacatatataagaagttaggattagtacttgataaaagagatgcaataggaatacttacaataacaccaagtgaagcgtcaataatagcagcagatgttgctacaaaggcttcaaatgtatctttaggttttatagatagatttagtggttcagtagtaatatcaggtgatgtaagttctgtagaatcagcgttaaatgatgttttagaagtcttaggaaatatgttaaacttctcatctacaaaaatcacaaggacataataatacaatgaagaatataatatttatgggaaagacaggtagtggtaaaactaccttatgtcaaaaactagaccagttagaattaaagtataaaaaaactcaatcagtggaactttataataatgcaatagatactcctggtgagtatatggaaaatagaaacctatataatgccttaataacaacatcagcagatgctaaaattatagcaatagtgtatgatgccacacaagaagaaaattatatagcaccaggttttgccagtatgttttgcaaagacgtaataggaattataactaaaataaataaagctactgaaaacgaagtcaatatagcttatgaaagactatcactagcaggagcaagtcaaatctttaaaatagacacagttgatgatattggacttgaaaaattatttaaatatctagaaaaatctaaaaatatagatgaagtttaaggggaaatatttttttattcaaaaatattattaaagtatgataaaataaaaaaatgtataaactattttaagaagatttaatctttaagcgaggtaggaacatggggaaaaaaatactattggttgatgatgaaccactgttaaggatggatacaaaagatatattagaaagtcatggctatgaaataataggcgaagcaagtgatggatttgaagctgttgaaatgtgtaaaaaacacaaacctgatttagttataatggatatagagatgccaatacttgatggtataaaggcaggcaaaataatatgtaaagaaaatctagctggtggagtacttttattaacttcatttgaagataaagaatacgtagaaaaggctaaaagtataggtgcttatggatatttagtaaaaacagcaagtgaaaaatcacttatcccaaccatagaaatgtgtttaaataaggtaaatgaatttgaaaaaatgaaaaaagatttagaaaaagtaaattctaaattgaatgaaagaaaattagtagaaagagcaaaaggtatacttataagagagtttaagatttctgaggatgaagcatacactagaataagaaaattaagtatggataaaagaactacaatgatggaaattgccaaaatgattataataggatacgatgactaatacgataaaaaaaatatcaactgcacaaacatacttaaataataacgaaattgaaaaaattatagaagtatcaaaatccttagatttaatggcttctttttatgaggctgatgtttttatagatgtactaagtaaatttgatgatgaagcaattgttgtggcacatggtagacctaaagaaaagtcaatgtactgtgaaaatgttataggtaaaaaggctttaattgaaaatgaaccaggagttataaagtgcttaaaaacaggagaaagagtaagagatattaaagctttaacacaggaatataaactggtcaaacaaaatattcagccaataacactagatgacaaagttttagcagtactaatagttgaaaaagatataagtagtgaagttaagaatgagtttaatgctagtgaagacgaagaaaataaaaatttacatcagtttataaaacttatcggaaataatgactttttagttgataatttaaattcagccatattaatatttgataaaaatggaaaattaaaaattaaaaatcgtattgcaactgagatatacaaaaatcttgggtttggatatgatatacaagatatgcattacaatgatttagatatagaaaccaacacctttgaaaatatattaatggatgaaaattatgatgagacaaatgaagtttcaataggtaatatgttttttaaaataaagaccatatacatcaaagatgatgaatttaaggtttgcaaaatagtacaagatataagtgatttaaagagaaaagaagaagaattagttttaaaaacagtggctataagagaagctcatcatagagtaaaaaataatcttcatacagtaatatctataataaaaaaacaaagtagattatctcaaaatgatgaagtaaagcagtgtttagataacataataaacagagtatttgcaatactttcaactcattatttactatctaaagaagttgataataatatatctatacgagaaggtatcaatttattagtgtcaaatattcaaggtggctatttatttagtaaggatatagatatacgtataactggtgaagattttaaaattagtggagaaaaagcaacagcaatacttttggttataaatgaaatactacaaaattgttatgaccatgcattttcggatagagaacatggtactatacaaatattaataaataaagataacgactatagaaatattgctattatagatgatggaattggatttgatagtaataatataaataaaaatagcttagggacatatataatagatagttatataacacagatgttaaaaggaaatatagagagaaaaagtaatgagaatggtacagaagtattaattactatacctacacaaattaatatttaaataataactcatctacaaagtagtagttttaattgagcaaagaggcttaaggttattaatagattaagttaattgaatgtatttataaaaattataagtatatattcaatttaacaggtatttattataactttaagcctctttgcttgtttaagacatacttaaattttaggaggtgagaaaatgagagaagagttattaagtgttggtattgacattggaacaagtactactcagttaattttttctaaattaatagtagaaaatactgaatcaaatttttcggtacctagaataagtatagtagacaaagaaattatttataaaagcaaagtttatttcacccctcttatttcaaataatgaaataaatggtcaacaaataaaagatatagttgaaaatgaatataaaaaagcaaatatatctaaagaggatatacatacaggagcagtaataataactggtgaaacagctagaaaagaaaatgcaaatgatgtacttcatactttgagtggatttgctggggacttcgttgttgcaacagcaggacctgatttagaaagtataatatcaggaaaaggagctggagctcatatttattcaaaagaacattcaactacaattgtaaatatagacataggtgggggaactagtaacatagcctcatttaaaaggggagaagtaaccgatactgggtgtttggatataggtggaagacttgtgaagatagataaaataagtaaaaaaataacttatatatcacctaaaatagataaaatcataaaagataataatttaaatcttcaagtaggcacaatggctactgtagaaaatacaaagccaatagtggatataatggttgacttattaatggaaagcataggattaaagaaacagacacctttgtttgattttataataaccaataaatcaataagtatagatgaaaatattaaaaatgtttcattctctggtggagtagctgattatatttactatgatggagaaataaaagattattttgaatatggtgacttgggaattttacttgggcaaacaataaaaaattgtgaataccttaaaaaagtaaatgtagttaaatctatggaaacaataagagccacagtggttggggcaggttctcatactactgaagtaagtggaagtacaataacttacactagcgaaaagtttccacttaagaacttgccagttttaaaattatcagttgatgaagaaacaggtacttcaaaacaaatcagtgaagctataaaaaataaacttaattggtttaaactagaaaatgatttgcagaaagttgctatagccatgataggaaagaaaaatccaacctttttagatatacaagagtatgctaaagggtttgtagatggaatgcaacaaatcatagaaaatgatttaccttttatagtaattgttgaaaatgatatggcaaaagtgttaggtcaagcaatatatgcattattaaattatgaaaaagaaattgtttgtatagacagtgtcaaggttgaaaatggagactatatcgacattggaaaacctatagttgaaggtaaagttttacctgtggtaataaaaacattagtttttaattaatagaaggaggtaagtaaatgattttaaatacaaaattatttggacgtacttatcagtttaaaggcttatatgatgtaatggctaaagctaatgaagaaaaatcaggagataaattagcaggtcttgcagcagaatcagctgaagaaagaatagcagcaaaagttgttttatcacacataaaattggaggatataagaaataatcctgcagtggcatatgaagaagatgaagtaacaagaataatacaagatgctgtaaatgaaaaagtttatgaagaaataaaaaattggacagtatctgaacttagagaatggctattggattcaaatactacaagtcttgatataagaagaatatcaagaggattaacttctgaaatgatagcagcagttgcaaaattaatgtcaaatatggacttagtttatgcagctaaaaagataaaggttactgctcactgtaatacaactataggagaacaaggaacattatcagcaagacttcaacctaatcatccaacagacgacccagatggaatacttgcatcacttcttgaaggtttaacttttggtataggagatgcagtacttggattaaatccagttgatgactctgttgagagcgttactaaagtattaaaaagatttgaagaagtaaaacaaaaatatcagataccaactcaaacatgtgtattggcacacgttactacacaaatggaagcaataagaaatggtgctcctgcagatttaatattccaatctatagcaggttctgaaaaaggaaatgaagcatttggatttaatggcgacactatagaagaagctagacagttagctttaaaacacggtacagctacaggacctaacgttatgtattttgaaactggacaaggttcagaattatcttcagaagcacatcatggaatagaccaagttactatggaagctagatgctatggatttgctaaaaagtatgaaccattcttagtaaatacagttgttgggtttataggacctgagtacttatatgatgctagagaagttgtaagagcaggacttgaagaccactttatgggtaaactacatggcttaccaatgggtgttgatgtttgttacactaaccatatgaaggctgaccaaaatgatatggaaaacttagccatactattaacaacagcaggatgtacgtattttatgggaatacctcatggagatgatgttatgcttaactatcaaacaacaggataccatgaaacagcatcacttagagaaatgtttggactaacagcaataaaagaatttgatgcttggatggaaaagatgggattctataaagatggtaagttaacagagttggcgggagacgcatctgtattattaggataggaggtatttaatatgaatgagaaggatttaaaagcattggtagaacaattagttggacaaatggttggagaattagatactaatgttgtatctgagactgttaaaaagacaactgaagttgtagtagacaacaatgcttttatagatgatataacagaagttgatataagaaagcaattactagtaaaaaatcctaaggatgcagaagcttatttagatatgaaagcaaaaacacctgcaagattaggtataggaagagctggtactagatataaaacagaaacagttttaagatttagagcagaccatgctgctgcacaagatgctgtattctcttatgtagatgaagaatttataaaagaaaataatatgtttgcagtggaaactttatgtaaagataaagatgaatacttaacaagaccagatttgggaagaaaattttctcaagaaactataaataatataaaatctaaatttggtacaaatcaaaaggttttaatattagttggagatgggcttagctcagctgcaatagaggcaaatttaaaagactgtgtgccagctataaaacagggtctaaaaatgtatggtatagattcaagtgaaattttatttgttaaacattgtagagttggtgctatggaccacttaggtgaagaattaggttgtgaagttatatgtatgttggttggagaaagaccaggattagttactgctgaatcaatgtcagcatatatagcttataagccatatataggaatggcagaagcaaaaagaacagttatatcaaatattcacaaaggtggaacaactgcagttgaagcaggtgctcatatagctgaacttataaaaactatgttagataaaaaagcttcaggaatagaccttaaataaagtcgagggagtgtagaatatgaaaaatgatgtaattcgtcctaatatactaggaattaaaataatttcgaatataagtccagaaatggcacaaaaactagaattaaaatcacatcacaaaagtttaggtttaataactgcagactgtgatgatgttacgtatacagctcttgacgaagcaactaaagcttcagaggttgatgttgtatatgcaaaatcaatgtatgcaggtgctgcaaatgcttcaacaaaacttgctggtgaagtattaggaataatagcaggcccaagcccagcagaagtaagaagtggtctaaatgcagtagttgattttctagagtatggagcaacttttataagtgcaaatgatgatgattcaatagcatactatgctcactgcgtatcaagaacaggtacatacctttcagagatagcaggaataagagaaggtgaagcattagcttatttagtagcaccaccacttgaagcaatgtatgcactagatgcagcaatgaaagctgcagatgttaagatgtgtgaattatttgcacctccaactgaaacaaactttggtggagcattacttacaggttctcaatcggcttgtaaagcagcatgtgatgcatttgcagaagcagtaaaatcagttgcagacaatccaacaggattttaaggatagttagatggatgctataggcttaatagaagtaataggatatgttgctgcaatagaagcttctgatgcttgtttaaaatctgcaaatgttaatattgtaagaattgataaggttggggcaggtattgttactttaacaatatgtggagatgtcggtgctgtaaaagctgctttagaagcaggtgaaatagcagcttccagagttggtacattaagaacatcacatattataccgagaatccataatgaagtaacaaatgctttattcaaaactaaagaacctaaagtctgtgaagtttcagaagataaagaaaaaaactttgagattacattggaaataactgataatgtatcgaaaaatttatcagaaaaagaaaatgtaattttagatgtcaatgaaaacagtggagatactgaaaatttatatagtgatatagataaaacaaacaaaaaaattgaaacagttgatgatagtttaacagaagctaatgaggaaaaaatagaaaatactaatgataaagaagtattggaacaagttaaaatagaaaattccgattttgatagagatgacctatcaaagaacagtgtaaaaaaacttaaagctatggctaagaaattagattcttcaataacttataaagatttaaatgttcttaaaaaagaagaattaataaacttagttaaaaagcttagcagaagggatagatagttatgacacttttagataaagatttagtatctatacaagaagtcagaactcttgtaagaagatctaaagtggctcaagagaaactttctaaaatgagtcaagagcaaatagataaaatagtaaaagctgttgtagatgcagcatttaataatgctactaaattagctaaaatggcaaatgaagaaactggatttggaaaatgggaagataaagtaattaaaaatacttttgcatctatgggagtttatgaaactttaaagaacacaaaaactattggaataattggtgaagataaagaagccaatacgatagatatagctacaccagttggagttgtggcaggtcttataccttcaacaaacccaacatcaacagtaatatacaaaactataatatctctaaaagcaggaaatactatagttttctctccacatccaaatgcaaaaaactgcatacttgaaacagttaatataataagtgaggctgctataaaggctggagctccagaggattcaatattatgtataactaatccaagtatagttggaaccaatgaattgatgaaacataaagatacaaacttaatactagcaactggaggagaagcaatggttagagctgcttactcttcaggaacaccagctattggagttggaccaggaaatggaccagcatttatagataaatcagcaaatgttaaattagcaatcaaaagaataatagattctaaaacttttgataatggtgttatatgtgcatcagagcaatctatagtaatagaaaaatctatggaagaaactgttttaaaagagcttaaaaatcaaggtgcatatgttttaaatgaagaggaaagtgaaagattagcaaaattcatattaagagctaatggtactatgaatccacaaatagttggtaaaagtgttgaggtaatagcaaatttagcagacttaacaaatatacctaaaaatacaaaagttctagttgcaagagaaaataaagttggtcacaatgtagcctattcaagagaaaaacttacaccaatactagcgttttatgttgaagaaaatgtagaagctattatgaacagatgtagagaaatattgttaaatgaaggtgcaggtcatacattctcaatgcatgtaaatgatgaagaattggtaaaaagatttgcccttaatatgccagtatcaagaatacttgtgaatactccttcagcacttggaggaataggtgcatcaacaaaccttgtaccagcactaacacttggttgtggtgcaataggtggaagttcaacttcaaacaatataggaccacttgatttaataaatgttaaaagagtagcttatggaatcaaagaaatagaagaacttggaagagataaatctcaagttgaaaaatcaatgtttgactcaatggataaagaagaattaataaatcttcttgttcaaaaactagtcaaagaactagcataactaaaataaacaatgaaacttatggctatcgctataaatttataaaaatataaactataaaaaactataaaattaaatttttggaggataagattatggcaagtgcaaacgcattaggaatgatagaaactaaaggattagtaggagcaatagaagcagcagatgcaatggttaaagctgcaaatgtacaattagtaggaaaagagcaagtaggtggaggattagttactgtaatggtaagaggagatgttggagctgttaaagctgctacagatgcaggagctgcagctgccgagagagttggagaactaatatcagttcatgttataccaagaccacactttgaagtagatgctatattaccaaaggtatcagctgagtaatataagaataattttaaaatttaaattttgattgaaaaagaggctatctcaaaaatgagtcttactaataaactcaatgtattttgaggtagtcttttttatacatctaataggagatgtgataaaatgggtgttttaacagaaaacgaagtaaaaagaaaaattggaaaaaacaaaaataatataactgaattttatatagaaaaaggtcaaataataactccttctgcaaaatcttatttagctgagagaagtattgagcttaaatatgttgataaactttcagatgtaaacaatgaacctaaagaagttgtaaaagaagtagttaaagagaaaaaatataaatatactactgtatttggcgctaaattggatgaaaaaccagaacatatgactcaattaaatggaaatcttttagtttttaaagaccataaaagaataatattgagaggaaaaatagattctcttgaatcagaaatactaaaggtacagatactttgtcagaaactagatatgccaaagcttgttaaggaattgcaagaagtattagactttgtaagaaatataatgagatgtgaagttttagatgaaaagctagaagactttaaacttttaggattaactcctcaagaacttagagaacaatctcactatcctaaaaaatactttggtataggacatgaattcccaagttatgaaatgggagaagtagtagtagctataaatagtataagaagtaatacacgagaggttgaacttgcagcctatgaagcatttaagggtgagtatggaaatgttcacagagaagatttaataaaggcacttaatagattatcgtcagtattttggataatgatatataaggttagaactaataagtataagtagttggaggacataatggagaatctattaaatgaaatagtggaagaagtaataactagagttaaaaaagaagcatttatagaagttgaagcatcaggaagacacgttcacttaagtagagaagatgtcgataaattatttggagaaggatatactcttacaaaactaaaagacctatctcaaccaggtcaatatgcatgtaaggaaagagttacaataactggtcctaaaggaagtataaaaaatgtagttgtacttggaccatgtagaaatgaaactcaggtagaaatatctttaacagatggttcaactcttggactaaaagctcctataaaacaaagtggagacttagaaggtactttaagtattaaaatatcaacacaatatggtgaagttgaacttgataaggggttaatggttgctaaaagacatatacacatgactcctaaagatgctgaaaaattcaatgtatgtgataaagagatagttgaagccaaggtgatgggtcaaagacctttaacatttgatgatgtagtaataagagtgagtgacagttttaaaacttatatgcatatagactatgatgaagccaatgcatgtggttattcaaaaggaactgttgctaaaataataaagaaagcataaatttaacctactatataaattacctctagggaggatttaatatgaattatgataaccttgtagatttaataacggaagaaatctataaaaaaataaatagtaatgaaataaaaatatctaataaacctaaagctgtgattgtatttgaacaagataacaataaatttaacttattaaaagatgaatttgaaatactagaatttgataaaagtataagggaatgtgaaatagtgatagtttcaagactttgtatgagggggctatcgaatatagcacttggaaattcaacaagtgatgaagaaagatttatactaaaaatgattatgaaaggcaaaaaagtatatgtcctagatgaaggaattgaatacaaaaaatataaggatactgcaccaaaagcattatataagaaatttatgtcatttgaagatgaaatatgtaaatttggtgtagaaattataaaagacttaaatgttataactaaaaataagttaaatataaagaaagaactagaaagtactagaggttctaaaaaagaagatacaaaagttttagataaagatgttttaaatttaaccagtgtagaaagtgtaaaaatagataatgaatttagtttggatttaaggaataaaaaacttatatcggaagctgacttaagaaaaccaactataaatggagttaaaaacatattagttaataaaaaaagtataataacaccattagctgtagattttatgagaatacaccatctcaaactaaagaaactgtaaggaggtaattttatggatataggaaaagttgtaggtaatgtttgggctacaagaaaagatgaaaaattatgtggccaaaaacttttagttgtaaaaattttaaaaactaaagacacatacaaggaaggcttcatggttgcagccgataatgcaggagcaggaaatggagacttagttcttatatccaaaggttcctcagctagagagtcgattgaaaaatctcatgttccagtagatgcaactatagttggagtagtcgattcgtttgaggtgtttgatgaataaaagtataggagctatagagtttaaaagcattgctaaaggtatagaagtatccaatgaaatgataaagaaatcttcagttgatgtattgtacttaaaaagtatttgcccaggtaaatttctaataatagtaggtggagaaacttcttatataaatgaatgtgtagattatggaataaaacttggagaaggatatattgtagataacttcgtaataaatgcaatttcacaagaaatattagatggatttaaaaataagtatcaaaagctagatagtatagtctctataggcgttgttgaaagtagtaaagtatgcgctggaataaaaatgcttgataagactttaaaatctggcgacttagtattagtaaaacttcaattatcttttgctataggtggcaaattagtatatgtagtagcaggagatttaagtagtttagaatatgcattaaaagaaagtgaaaatgtagtaagagaaaaagaagtaatatataagactgtaataccatcagtagacagtcaaataataaaaagtctaataaaataatggggggaattatgagtataaacgaaattataatctatgtaatggtagtcttcatggtacttggagctatagataaatgtataggtaacaaatttggtcttggagaacaatttgaagaaggtataatggcaatggggtcacttgcagttgcaatggttggtgttatatgtttagcaccagttcttgctgatgtattaagaccaattgtagtaccagtatttaatatacttggagctgacccagctatgtttgctggaagtttattagctaatgatatgggtggtgcgccacttgcacttgaacttgcgaaagaccctaattctgggttatttggtggattaatagtaggggctatgatgggacctacaatagtatttataataccagttgcgcttggaataattgaaaaagaagaccaaaaattcttagcaacaggaatacttgcaggtataataacaatacctattggagcattcgttggtggattagttgcaggattcgaggtaatgatggttcttagaaacttagtgccaataataatatttgcagtagttatagcacttggattattaaaattcgaaaatgctatgataaaaggattcacatactttggaaaaggtgtagtaatagttataactttaggacttgctgctgccatagttgaagctttaacaggaatagttgtaatacctggaatgaaaccaatcagtgaaggtatagaaatagttggagatatagcaatagttttagcaggagcattcccattagtgtttgttataacaaaggtatttaataaaccattaatggctttaggaaaagttcttggaatgaatgatgtatcagcagcaggccttgttgcaagtttagctaactgtataccaatgtttggtatgatgaaagatatggacaatagaggaaaaataataaatgtagcattctctgtatcagcagcattcgtatttggagaccacttaggatttacggcaggatttaattctaatatgataacaccaatgatagttgctaaattagttggtggtataacagcagtattgttagctatggttatcgcaaataagacactaaggaaggagaatgtataagatggatatatcaaatatagataaaaatttaattgaaacattagtaagacaaataatagaagaaaaaataagtggaactaaagacacagtagattttgttagaaataaagacattagtggaataacttctataaagttaccaactgtaaaagttagtgaatctgatagattagatacagggaatccaagtgatgtagtttacacaaaagatttatttacattagaggaaagcccaagattaggttgtggtatgatggaaatgaaagaaacaacttttgattggactctaaactatgatgaaatagattatgtaatagatggaactttagatataataatagatggaagaaaggtttctgcttcttcaggtgaattaatattcataccaaaaggaagtaagatacaattttctgtacctgattatgctagatttatatatgtaacatatccggcagattgggcatctcaaaattaataaaaatcaagttaagttaataataatcaaataaataatttaaaatacaaactcttaaataaacacacatatttaaaaaagctatgaattaaaattcatagctttttttataaagaatgttatattttagacgtattttttctatatttactgggagacatattatattttttattaaataatctaataaaatgctctacatttggataaccaatactattttactgataatcttttccttatcactaatcttacattttaaaatattatttttactcgtaatattatcataagaatttgtttcttatttaaaactaattagaattataaagtttattgccatgttattaataaaataaatccagttaaatcgagtgctagttaaagtaataagaaacttttacaatggtttcctttatcgattgaaataaaagttaatatggtataatatctaaagagagaatcttatcaattagaatatgcatagaaacaagtggcttaaaaggagacgttatatggaagagatagtaaagaaggaacaagcaagtatgaatgatatttttttgtatcttaaagctaaatcaaactcattatataaatttgtaatattatataatgagtttatcaataaacctaaagattatggaactggggaacttataaacatggttgaagtacatatgctaacagcgattgaagaaaatccaggaataagtccaactcagttagctaaaatatggaacagaactaaaggtgcaatatctcaaactatatctaaattggagaaaaagggttatataactaaagaaaagaaagaaggaaatgcaaaaactatattactatatccaaccacatcaggagtagagttaagtaaggcacataaactatatgacaccatagatgttacaagaacatttgaatacttaatcaaggagtgtacattagaggagatagatagtttttataaagtaattgatttgtttattaatttattagaagaatctccgcaggaaaataatgattctgaaaaagtgtagctaagattgaagttgaataaagagaaatagatattatagaagtagtacttaagtacacattatataaaaatataataggtataggattaaaaagtttagtggtttaaagtttaaccactaaacttttttaatgtctataatctactattatttaatttactaaaaataaaaaaactcattatattaagatgaaaatagaaaaataactagaaaaatactataatatatcagcttaatacagaaaaaagttaaaaatattgagaaaaataaaaatgaaaacgttttatattgacatagagaaaaagtagtgataccatttaaatatagtttagtagctaaactatatttaaattataataactattttagggggatgttatgaatttaaaacaattaagtgaaaaatacgaagaatatgtaattcaaatgagaagagaatttcataagtatccagaattatcttttaaagaaataagaacaacccaaagaataagggaagaattacaaaaaataggggtcccttttgtatctattgaaccaaatatcgtaatagctactatacaaggcaaaaatgaaggtaagacaattgcaattagaggagatatagatgcgcttccaatgcaagaagattcagatgttgaatacaaatcagaatatgatggaataatgcattcttgtggacatgatgctcatggagctatgttactaggacttgcacatatgctaaatgatataagaaaagatttaaaaggtagagtattattagtttttcaagcagctgaagaagttggtggcggacacaaggagataatacagtactttaaggaaaatggaggaccagatagattaatagctactcatgtttggtccgatattgaagctggtaaaatttctgttgaaccaggacctcgtatggctggtgggtctggttggagaatagacataacaggtagaggaggtcatggttctagaccagatcaaagcatagatcctataaagccagcttgtgatatagttttaaaagtatcttctataccagttaatcatataagtgtactagaacaatgtgttgtacatgcatgtgcaatacatggaggaactacaataggaaatgttattccaaacaatgcagaggtaataggtggatatagatattttactgaagaatcaggcaaaaaagtgtttgacattataaagcaaatgagtaatggtgttggacaagcttatggagtggatgtgaaggttactcatactggaggcataggacctgttatcaatgatgaagaagcagttaagatggctaaagaaatagtttctaatatagatggattggagttagattcttatgagccaatatgtgcatcagattgttatggtgaaatattaaaagagtattctggtttttattgttatctaggggtaggtaacaaagaaaaaggaataatatatgcacaacaccatcctaagtacaatatagatgaagatacattaaagttaggttgcgaatttatggctaaatatgcagttgaatttttaaataaaaataataactaaaataaatcgaattttataaatgggggggatgaaaatgcaaggtgcattaaaggaaaataagaaaaaaagtggtggaggatttttaggatggattgaaagagttgggaataaaatgccacatcctctagcattatttacatatattacattgatagtagtagcattatctgcaatagcaagctttttaggtttttcagcaacaagtcctgctacaggaaagttaataaaagttatgaacttaataagtgcaaaaggtttagtactatttatgcaagagtttgttaagaacttccaaaacttccctgtgcttggggtagttttagttatggcagttgccacaggagtttgtgaaaagacaggatttttttcaactgccataaaaatgagtttatcaaaagttaaggggaatgcggttgtatttataatagcttttataggagtatttgctaatcaagctggtgatgctgcttttgtattagtaccaactcttgcaggagcaatattttatggattaaatagaaatccattagctggtatattctgtggatttgcatcagttggtggtggatttgcaacagctgtaattcctgggggatgggacgttacgctaacgccaataactgtatcagctgctcaaactattcaacctgcatttgatatgacattattagctagttattatgcactatttgtatctgcgtttatagtagctacagtatcaacaatagtaacggttaaatttatagaacctaaattaggtaagtatactggtaaaccagaaggtatagatgataatcaaggttttgaggtcacaaaagaacaagcaaaagcagcaaagttagcaggttttacagttttagcttatgtagcgttattaattgctttgtgtataccagctaatagttttttaagaagtccagaaggttctttaatatttggagcaccacttatgtcttgcttacagttttttatagtaatactattcttcttgccagggattgtgtatggaatgagggttggtaaaatcaagactgtaaaagacttaaatgatatattatgtcaatcaatggcagcaatggcaccgtttatcgtacttgcaatagttataggtcaattcttaacgctattctcagtgtctaatttagcacaggtactagctataaaaggtggagcattactcaactcattgccactaccaccacaagttataatactgctattcttagtactagtagcgtttataaatatatttgttataagcggaagtacaaaatggatgatatttggaccagtatttgttccgatgttaatgcaattaaacatacatccagcatttactcagtttgtatatagattaggagattctgtaactaatcatttatcaccattaaatgcattctttataatacttttagcaacagtccaaaaatacgataaaaatgcaggtatgggaactatattctcagctatgataccttacactataggttactttgtagtacttgcagttttagtagtagtttggatgacaataggtataccagtaggaataggtggacaagtttggttataaaacatatttaataattttgggaggaaagaaaatggaaacaactgaaataagatacaattttgatgaagtaatagatagaagtggaacaaactgtcttaaatatgatcttaagagtcaatttatgccagaatctccagaagatgcactaccactatgggtagcagacatggattttgcatgtgctcctgagataattaatgcaatgcatgaaagaatagacagaaaaatatttggatatagctctcaacaaactgatgattattatgaagctgtatgtggatggtttaagagaagatttgattggaaaatagaaaaagagaatatattctttagcccaggggttgtgcctgcgttaggatttttcatacaaatattaacacaaaagggtgatggtatcataatagaaaagcctgtatactatccttttgaagataaaataactaataatgaaagaaaagtagttaatagtcctttaaagtttgaagatggtcattattctatggattatgatggatttgaagaattagctaaagatgaaaataataaggtgtttatattatgtagtcctcataatccagttggtagagtatggaaaaaagaagaacttagaaaaatagtagacatatgtaagaaatatgatttgtggataatatctgatgaaatacattgtgatattattcgtaaaagtgaaaagcatataccattagaagtagcatgtcctgattataaagatagaataataacttgtacagctccaagtaagagttttaacttagctggtatgcaattatcaaatatagtaatcaataataaggaattacaagaaaaatggatgcttgaaacagattctaaattagctatattcctacctaatccattcgcaatagttgctactaaagttgcttataatgattgtgaagattggatgaatcaagtaaatgagtatatagatggtaatattaaatatgtagaagattttgttaatgagtatatgcctaaagtaaagataataaaatctcaaggaacttacttaatttggttagactttagagggtatggattagatgcaaaacagcttgaatatgtaatgcttaacaaggcgaaggtattgctagatgaaggatacatattcggagaagaaggagcaggatttgaaagaataaatgttgcttcgcctagaacaattatagaagagtgtatgaatagaataaaatgtgcatttgaaggattataatagtaatatctaaataatatatttgtgtattttaaaaaaagactatgttaaaaaaatatttcaaagcatagtcttttaaagttttatgatgagtttaaaaaatttcaaaacgttactattattgataatcttcacttatatgtttatattagaaataattccacaatatgctcattttctaaagttgcacttttatacaccttgcttcaccaatatcatgtgtaaccaaaatagtagacttattctcattcttaataatactataaacatcatcacaaactaataatctagtctgataatcaagagctgaaaaaggttcatctaaaagtagaatatctggatttacagaaagtgttctaataagcgcaactctttgtctcatacctccagataattcttttggatacatacttctaaaatcccataatccataagtctttaaaaggctttcaactctatctaaagattttttatcttttttgccttgaatttccaatccaatagttatattatccattatatttctccattcaagcaaattatctttttgaaacatatatccaatatttccagtaatctttatatcaccactagtcggttttaaaagattagtaagaatatttaatattgtagatttaccacttccagaaggaccaagcaaagttaatatttctccttctttcaagttaaaattgacatcctttaatacttcaagctcgccttccttagtgtagaagttcatatttatatttttaacttctactatgttgtcattcattatgccaccccctataacttttagctcgtatatattatgttattaacaatatgacctatttgtaccatttttcataaatataatataaatattttgtttatttacgtattttcttagtaacttgtacgtataaattataataaataaattataaggtaggggataaatttgagtaacataataacgaatttaatagagtcagtatttactaatccaataactatattgtttttacttgcaataactgtgtattctgtttttaaaataatagaaaataacagagtatattcatttgtaagttcaaaattagacgaaatcaatagagattataagacaagtgagttttataaaaaggtaagggatgactactatacatatagtaaagaaaatccttatgcagacgtaaatataacttcatttatagaggaagttgtatctgatttaaagcataataatttgccattgttagaaaaaattagaagtataaaaaattcatcttcaataagtatattacttggggttttaggtacgtttgttggtctttctacaatgcttttatgtgttgatactaaagacattataaattcacttccttcaactattagtagtatgcaaactgcatttacaactagtatatttggagttgtattttctctaattataggttactttactaagataaaagattgtgaacatgttttgatacaaataatgttaaaatctgaaaatttactaacatctgaaataactcattttaagtcagaaagaatggatttaaaagtagaagaggtaaaaaatacaataaaacaaataagtaagtctatagaagctattgaaaaatttgataaaatatctaaagatttaaatgactttaatgatgaatttatcagtggtatagaagctttaaaaagccttttagaaggttctcaaagttctattaagacatttgaccagagcgtaagaaaattagataaacagtttaatattttaaatataaaatttgtaaagctttttgataaatatgataatcaagataatataaataaagagattttatttgatataaaagaatcttcaaaaaatatatacaatgccactgaaagccaattcaaaattagagattatataaaaaatataaatgcaggatttgctctatatgaaagaagtgctcaagatttattaactaaattaatgacccatgaaaataaaatctctcaaaatcaaaaaatccttttagatgaaaagtttaccttagatgactcaataaaaaatctctcaagtattattgaaaacttttctaatgacctacaagttaaactggatatgatgtttgaaaattctttagatattcaagataagttagatgttatgtttaataactcttttatgaatgatgaagttcctcttgatagtgaggaattatttaaggatgatgttaataatgtatttaatccttttagtgaagaaatttatgagatagaggataaagaaataaaggtcataggtgaggatgagttaaatgaataataaatatagaagaactgttaacagagaatttgaaaagagtagcttttggccaacatttacagatttattatctactgtattgatggttgtgattcttatcttatttagctcagaaagtatttcaggttctgttgaacaagatttagctaagaatgtcaatgcttctgttgaagaaacttttaaaaaaagcaaaatacctgtgaaggtagataaatctaatgggcaagtaacttttggtgaaaaaaccatgtttgatgtagatagtgatgttttaaaaccagaggctaaagaaatgctaaaaatgtttgttccaaagtacatagagactatttataaagattatggtgactatatatccaaaatagttatagaaggtcatacagatgatgtgggaagttatatatacaacttagatttatcgcaaagaagagcatatagcgttgctaaatttatagtgggagatgaaataggtgactataaatacaaagataaagtgactaagcatattattgcaataggaaggtcaaaagctgaactcatcaaaaatggtgacaatagcgtgaatagagatgcatctagaagagtagaactaaaatacgaaataaatattaatcaaaataaataattaaatttttataaaaaaaaagaaggcagttggtgtgagctttaagccttctttaaggaaaaagtttatttatttttgttgatacttaacatattatagtttttagaagcagtttgcaatatattaaacgtaaatggtcgtttaaaatgcataactggatactactgatgtaaaatatttcattttatataatataaaaattatacagtgtcaattttctatattattgtactataatctattatttaaaatattatgtaaaaaaatatcataaaaacgcatatcatgttataattactagagtattatgaatatggaggcgtagtttgtgatagaaataagtataaaaaataaaaaaaattctaaaattaaaactttgatacttttattgatagtatctatatcgatttatttaactggttgtactacatcagataatggaaataatcaatcaaataataatgattctttgtctagtagtatatcaagtgataagaatgtaaaaattcattttattgacactggaaatagtgatgcaatattgattcaagatggtaaaacttttacattgatagatgggggagataatgatgatgagggattaatggtagattacctaaacaatcaaggtgtaaaagatattaaatatcttatagctacccattctcatgcagaccatttaggtggacttgattctgttgtcaaaaactttaatatagaaaatgtttttgtatcgaatggttcagcagaaacaaagagttatagggactttataaatgctttagcaaataagggtttatccccaagtgtaccgcttgaaaataataagttctatttagaagattcttattttgaagttctaaatacaaatgggggagatactactaatgaacaatctctagtccttgtatatactaatgggaatgataaagttttatttacaggtgatgctgaagaaggtaccgaaaaagaaatactacctaagcttgagaaagtagaccttttaaaagtagctcatcatggttctcgtagtagttcatctcaagagtttttagataaagtaaatcctgaatatgcggttcttttagtaggcaagggtaattcatatggtcatccacatcaggagacaatgaataaattgaaaaaaatgggagtaaaagtacatagaagtgatgagtgttcagatataatatttgaatcaacaggtgatggagtatttacaagttgtaaagatggaagttataataaaggtgttagagaagatggaaactctggaaaatcaaacagtaatacaagtaaaaatgattcttttaaaaataaacaaaatacattcaattcagaagaaatagtgtattttactccaaaaggtaagagttatcactctataaaaaattgtagtgggctttcaagaagtaaaaaaatattatcaggcacaattgaagaaagtaagaaaaatgacccatgtgatatatgttatggaaaataacaaaaaaacaaccaatttatctataaagcttctgaactttaaatcatttaaaaaataaaataaatgcataaaaaaaataagctataatcaatagataatacatttcatctatacgaatagcttatttttttaagtattttttaatagctatttaataactctaaatacaccagttacaatacctacaatttcaacttctgagtcattgagcataattggttccataaaatcattttctggctgaagtcttattaaatttccttctttaaaaaacctcttaactgtagcagattcaccatttataagtgcaactactatctgagaatttaaggccgtattttttttgtctactacaacgtaatcttcatctaaaattcctgcattaatcatactttcgccttttactcttaatacaaaattgttactgccctttactaaactggcagggaatggaatgtattcctctatgttttgttgagctaaaatgggttctccagctgttatttgacctactaaaggaagctctattatttcttgattagctccagaaacatcatttactttactacgttctaaaacttcaatagctcttggtttagtagggtcctttcttatgtatcccagtttttcaagtttatttagatgagagtgcacagttgaagtagatcttaaccctacagcagtacatatttctcttacagcaggtggataaccttttaatgtgatttgagactttataaattccaatatcaagacttgcttttcagttagatctaaatacataacatcactcatttccaaacatattttgtttttatttccatacactttatatttttaattataacataatccatttatatctgcaaacatttgttcctgatttttaatcgtcctcaatccattcaaaattcttgactatatcacgttttacatttttcttatgagctgcataaagctgagtagttgtgacattatcatggtcaagtaagttttgaacatcatatatagaaaatcctgtttggattagagaagttgcagccgttgctcttaatttatggggactatatccattgtctctagtagtatcaagtggaatagatgtatatttttttaccagtgttcttatagcctttgctgtaattctcttattttgaagagacaaaaataaagcatctttttcttcatcatttaatagttcatctcttgttctttcgttttgcaaataatcttttattacatgttcacaagtatgatttataggcattaaaacttctttcccacgttttctatatattttaaattcacctcttgaaaaattaaaagaggagatattgagttctctaagctcatttaatctaagcccgtatgtaacaaataatgctagtatagctttgtcacgtaatttagtttttctccaatataccttttctttctctgtaagcccttcacctgtttctactgattcaagcatcttagcaacttcatctatctcaaggcgcttaatagcatctggctgaggtttaggaagttttattggattgaatccatcagttatattattatctatctgagagtttctgtataagaatttaaatagagtagagatggatgatttttttcttgctaacgctctattgttattttcaaaaatcaatgtgtttttttctgtatttttgtaatatctactgcaataatcacctaagaataaatttatatctcttgattttattgtattaaaatcatcttctgtaatatcttttacacaatctgcatttgttaattctttggtttcaatcaaatatgaacaaaaaaaattaatatcttctaaataagcaagtcgtgtagaaactgcaacagaaccttttaaatatataaaataatccttcataaatacaggaagtttattttccaaaagtagacatttttctatgagttcattttctttgataacaatattatcaggtttatctgatttattatgtacttttataattttcttatcattattcaaaattaaacctcctaaaactaaaatataaatcttttatattattttttgatatttataccaagtgagtataaatatttaatttaatcattttttacatttttaagagattagcagtgctttagatgaaattatcactaactattccctaaatccacatttaaagactagttgaatttaagtactctttttttatttctcaatatatttatagaaatattttaaaatatattgagaaattttttatgctctactaaaatcttttttatataatatttttatatatttctaacgaaaccaaatattagtaaaatatgtatttatttaactaaagtttttaaatgggctgactaagcttaaaatataggatattatgagagttactattgaaaaaataaaccctattgccataaagaaacttataaatatgttatacttaactattaaactggatatattcaagttatcaaatccaaataagtatgtaattgaacttattacaaaaataactataactataaagctcagaccatttaagctattttttaaatcagcactactaagtgacatatgtgtagatatagaatacattaaaaacataaatataaaatacttcaatgaatatacactaggtgttaacaacattattcttataaaattggaaatatcacctaaaataatgtgtataaaaccatttatatttaaattattaatcatacttacatataactttaaatctatattttgagtcactttcatataactatctggcagtaatatcttaaaaattaaaataatcattattgttccacctataataggtgcaattcctataaagaaatttcctatactttgataaagattatcttttttatagctatgacttacatatcctagtataccatcatttttactttctattggtctgaaaaacttaactgaatttattttatgcatgaaaatcaagcacattatcaaatgactcaattcatgaacaaacgttcctatagctccagttacaataattccagtttttccaaaagatgaaaagataaatttattatttagattttctgtaatgctaaaaatcaatccaaatacaataaatattcctatgaaacaaaaaatatttattacacttatttttaaaatttcgattatataaatcataagttaagtcctcatgtaaaagtatttaactactctacttcatatccattacagcttaaaattttacaagcatcttctatatctttttcttttactaagatatagtctgtatcatacgtagaaattgcaaatatgcttattttgttgtctgctaacaaactacttaacttagataaaattcctacaagtgaaaagtctaaaggacctagtatcttaagtattctccactccttttctgacttaacatcagaaggaatattattatttaaacatacaacacttaattcatcatcagttctagttatagagtaaaacttctctgtatctatccatgttggtattttactgtcattatttaatctacatactgcatactcttctaccaataattttaatttcataatgtatatttcctccaatcttatttgtttacttaagattatacattaaaagttacataaaataaaacatataaagtaaaaaaggttcactatagtgtcctatttctatagccaacctttaaaacttaattaaattctaataaagagatatattatctaggttcaattataagtttaatggctgttttcttatcaccttcgatttctatatcagtaaatgcgggaatgcaaactaaatccattccactaggtgcaacaaaacctcttgctattgcaattgattttatcgcttgatttagagctccagctcctatagcttgtatttctgcaacgcctcgttctcttagtactccagccaaggctccagctacagaattaggattagattttgatgaaacttttagtacctccatttcaacatctccttgttaatttgttaaagtatccattacctaaagtactaaatcataattgccatttactaattacaatcatcatttaaagtatacttttataaaaatatacttctataatcgttttaagaaaacctttattttttttaaccattttattatgaaaaaactacaaatttctttatattctataagcattttccaatatttctaaattttttatatctttgagctataatttcctctttatccatatctttgtaatgatttaatctttctaaaatataagcttttatttcttttgaaacagcttctacatctttttgtgctcctccaagaggttcttttataatcttatctattatttttaaatcatataaatcattacttgtaagcttcataacatcacaagcttctttagctttagatgaatctttaaatagaatactagaaagcccttctggagaaatcacagaataaactgaatgttctagcatacaaacatcatttcctactccgatacctaaagctcctccactaccaccttcaccaattacaaaagtgattactggaacagaaagtttactcatttcaagtaagtttcttgcaatagcttctccttgtcctctttcttctgcttctaaaccacaaaaagctcctgatgtatcaataaacgttattataggtctattaaatttttcagcttgtttcataagtcttaatgcttttctgtatccttctggatgaggcattccaaaatttctttttatattttcttttgtatctcttcctttttggtgtccaactatagtaacattaaactttcctatctgaccaatccctccaaccatagaagggtcatctttaaaaagcctatctccatgaagttctaaaaaattagaacaaatatgttctatgtattccaatgtcgtaggtctctttatatctctacttagtgttaccttttcatatgctgatagatgtgaaaaagcatcttccttaagcttttccaatttctcattaagtgaatttattttatcacttaaatctatattatttgccttagaaatagttattaattgtttaatatcattttctaagacttttattttttcactattattttcaatcaaaacagttcctcctttatgccctatttcttgtgcatagcaagaatttgatataataattccttcatttttcttctatctactatcatgtcaataaaacctttttcaagtaaaaactcagaagtttgaaatccttcaggaagtttttgatttattgtttgctctattactcttggacctgcaaaacctatcaacgtatttggctcagaaattataatatcaccaagcatagcaaaactagcagttactcctccagtagtagggtcagttagaactgatatatatggcaatgatttttcttcaagcttagaaagtgcttgagaagtctttgccatctgcataagagataccataccttcttgcattctagctcctcctgaagcagaacaaataattataggtaaattattttcagcagcatactctattgaataagttattttttccccaacaatagaacccatacttcccatcataaaatcaggattcattacacaaataactgttttaattccatttattcttccataacctgtgacaacagcttctgactcttttgttttttccttataagagtctactttttctttgtatttaggaaaatttagtggattttgaaattctacatcagaattaaactccataaaagttcctttatcaatcaataaatttattctttttcttgctcttaagccataatgtcttgaacattttggacatacaaatgaattttcttctatgtcctttctaaatacatgactatcacaacctttgcaataggtccaaaatttatcatctacactattctttttaaagttgtcatctaaagaaatcgtaacatacttagattcttttgatgataaaaatttttttatcataatctatttactccttataatgtagcaaattctttcttcataaagacatcttctataaatttggtatgatgagtatcttctctaaactcctcacttgttacaagtgccttttgaaattctacatttgtattaataccttctacaataatttcgtctagagctctatatattctacttatacattcttctctagtttcagcccaacatattaacttacctatcatagaatcatataaaggtggtatagtatatcctgcatatacaaaagtatcaaatctaacaccaaaacctccaggtaaatttaatgattctatcttacctggtgatggagcaaaattctttgatgaatcttctgcatttattctacattcaatagcatgacctctaaaagtaatatcttcttgtttaaaaggaattttatccccattagctatagatatttgaagttttataaggtcaagatttgttaccatctctgtaactggatgttcaacttgtattcttgtattcatctctataaaataaaagtttttatctttgtcaactataaactcaatagtacctgcaccgatataacctactccttttactatatctactgcaattttatgaagtttttgtctttcttcatctgaaaggtatggacttaaagattcttctattactttttgatttcgcctttgcatagaacaatctctatcacctaaatgtattgcatttgaatgtttatctccaaatacttgtacttctatatgtctaggattttctataaacttttccatatataaatcactattagaaaatgctgctagagcttctgaacttgccatatcaaaatttgaaaaaagttcttcttcttttctaacgattctcataccttttccaccgcctccacttgaggcttttatcataacaggatatccaatttctcttgcaacttctaaagcttcttccttagttttcaaaacagattctgaaccaggaacaacagggatattcaattccatcatagtttctcttgctctagatttatctcccatcaaaatcatttgttctcttgttggacctataaaaataatattattatcttcacattgctttgcaaattcaggattctctgataagaatccaaagcctggatgaatagcatcacactttaatttaagagcaagatagattatattttctatattattataactcttacttatattatttggtcctatacaaatagattcatcagctatatatctatgaaaacaatctttatctatttcagaatagatagcaacagtttttatacctagttctttacatgttctgatgattctaactgctatatcgcctctatttgcaactagtattttttttatcaacttaaatacctcctactacaatggttttatcttaaataaaggttgattatattctactagttcttcattactaactaatacttcaattatttcacctttaatttcgcttgttatctcattcataagcttcattgcttctaatatacataaagtgtcgccttcttcaactacatcgccaactttaacaaagctatctgcatctggacttggagaatcatagaatgttcccatcaaaggagctactactactgatagattctcattagatgtgacaggtgtatcgtttacaactggcttttctaaagaaagatccactactgattcttgttgtacacttaaaacaggtgaacttgtagattgagcttttttagatacttctaatcttaaatcgctactttcaagttttacatattctaagttagttgagtctatggcctttaataattccttaatttcattgatgttcattttgttacccccttgtattattacctggtgctaatattatatcacaaaaaacaaatttataaaagaaaaagtgctgactagagaatcaacacatcaatatatcttttaattttaaattaacaaccagtaacttatatttgttttaattttccattattaatataaattataagtataaaatgaataaaattcaatattttttgcaaaatacaagagaatacaaattaatacctcgggaatttttaagacaaataccaatattatgcaatttagacttcgctttctttcaaattagtatcattttctttatttttacataggatgtactttaatttagctatcaaaacattactatataggttaaaagttattagaattgcaggaattataaagtaaactctagcacctataaaaccaaaaactactgtaataagtattaatcttttatttaaagtaaaaaaaggtatattaaaaatacttttgtcggatgtttctggagtataagaatatataactccaaaaatcaaagtaagcatacaaagtggaagtagtgtataacttgaaattattcccagaaatcctatactttcaaaatatttgctagcactatttgtataaacaaacatgtatccatttaaatatgcgcatatacatgatataatgccaaaagttccccctaaggattgagtgtaccaattaaaaaatttagattccatatacctcacctcctaaaactgtatatataatgatatgcatttaaatagtaaaatatatctttatatgtttctgaataaaattttgttaatttcattaatttatgtttaagaaatttgaagtatagtgtagtatatattaatgtagatgaagttttatagtacttatttcatagtgcttaatcaagttatcttattatggattcaaaagttgtttgtagggttttatattttgttgagctgaaaaatttattataaatgaagggatgttttcgctttggtagatacattagaatttggtcttaaaattttattttttatattatcaataatttggatgggtaaaataatgattttaagaactgataagcaaatagtaatcaatcctttgcttattggtatatctgcagtccttgtgatgttgcatacctcacagagtaacattgaattttttggattagatgtccaatatataagaatagttttgtatataatatattcactgataattttaataggaatatgggctactaacagaagaaatggaattttttagataatctatttctataaaatttaaaggttgctagtaacaaagcactaatattagcgttctgttactaacaacctttattttgattatacacttaaattgaaaatagaatgattgaataagttgacatattattttacattgacagtgattagaacttcttgagatgtatttaaatcatttttgtcgcttagtataacttttaccacagcttgacctgttttattacctttaattatcatatcttcacatgaaagtacactcttatcacttacagatacaataaagtctaaatcttttggaagattatcagtaacttcccagtatttataataactatcaattttcttcgtaattatttttctcaaatcaatactttcaccttttgctatatcaacattatgatatttagagtccagtttatactgattatcttttgtatcaataaaatttaaatcgcaatttacatccacaccattatgagaaagagaatttactacatcgtcatcaatcaaataattattggcaagatttattgaatccatatcttttagacttaaagcttccttaggaacctcttttatattattattccaaaaaataaaattgtctacattttcaagatatgatattccttttaaatttgaaatgctctcaccagttgcataaaattctccatctaaagcctttatattgcttatagtcatctcatctgggtttatatatctttttacaactgctcttaaatttgcatcaggaaaaatatctttaagttgattttcgctcaaaaccttatcatttgaatttattggacttaaagctgctgcagaaataataaatggtattaaattagctaaattcatagtaccctcccacataaattttttattataataatttaatttctatgagagggttctgtttccttgttatatatacctactttcgtacactttattaatataaattaaaataaatttctactattaaacttataaacatattactagttacgttttttagcttcacatctaaatattcgcataccttgtgacataaatttgtcttcatactctgttgtaacattattttcatactcactatttcctaaatcaagagaaatattctttaatagccaattatttgcagcaatttcatttaaactaaactcgaataatttttcattatctgttttaaagtgaatttcgccatcatcttccaaaaccctattgtacatttctaaaaatccagaatgagtgagtcttcttttactccatctatttttaggccatgggtcacagaaatttatataaattctcgataattctttagcttcaaagtaatccaaaatattgcttacatctccccataaaaatagtatattattcaaattagaagcatctgctttttcaacagcttttaaaagaacttcttccttaagttccatggcaatataatttatgtcagggttctgcttagctaaagttgttataaacttaccttttccagtcccaaattcaacatgtattggattatcatttctaaactttaaattccacttgccttttaatttgtctatatcgtctcttaaaacatattttgtataacttaaaagcttttcatctgcacctttttttcgtcttcttctcacaataattctccttacatataaaaaattagtaaaatacatttttattatacattatctcaccaaaaaataaaaagaactctcttaaaatagaaatttatttctataaagagagttctaaacttactaaaaacttaatcttagtggcaccctgaacaaccagagcatcctcctccaccttgatctttcatattttcaggaataactctaaatccaaatcctgtatcttctattattatatctccatactgactatattcatcagagctcattacaaattgtaattctccaacttcataagttaagtcatcttcttttttctcatctaaagctaatccaaaagaaggacctccacaaccaacacctgcaaagtatactcttatattattaggtttatcttgattgtcttttaagatactttttaaagtatcaatagctgtttctggtaaagtaattttcatcaaatcattccctttcaaatattttattaaaacaatatctattatatacccatacaaggtacataatcaattagtttttgcatattttactaaaacttctacctaatattacctaaggctttaaaatattttatataatattttattaccttaaataaataccctatcataaacttagtaaacaaataaaattattattctaaaaaatataataattttatttgttgttttaatattataacacatttgataatgtccaattcatatatgcaaaatttatatactttaaaatatctaagaaattattcaataaaaaaatactattttttaaaaattatcattattgataaagctctactatttatattttttagtgtattcatgtataataagtaaaagcacaacggtatatactgttgtgcttttttgtaattaataaacaatattttggtctataacaatgaaaaatggctactttccataattgatttcatctgacataagcaaaaagggtgtccagctgggtcaatcataactctccagtcatcagtaaattgctcctctgcgattgtagctccacaatgaatttcatattgaactgcttcttctaaatcattaacagcgaaatccatatgagccatttgctgttgagattcaggtttttctggccacacaggcggtttatactcagaatttcgttgaaatgttataccaggatatgttccctgatttgttcctggagcaccaacacatgcatattcttcattataaaatgctatttcccaattgagtaacgctgcataaaattttgctaattcatgtgggtctttgcaatccatcgtaaatgagtacattttgattttcagttcatcatgcataacgtaattacctccaagtataaatttcttcgtcttttcatttttaagctaaattcaaacattaagtatgtaatttatttcaagtatttttctattatgccccaagcctttgttttttgcaatataaagaaaaaattatatattttaatattttataattgttgaaattgtgtaataaattcaactggatacatagtgcgttttgaaatttcttctaaagctaaaccttgttttaaaagcctctttatgacgctttccatactttctgaaatttctataatatttttatcaaaatcataaaacctaaaagttctttgaccccatgggtattcttttatataatgcaaaaattcaatatttcctattctatttatcttactttcccattgtttgatatcattaacctcaaaatacaactgaaagttatttgattgttgatatattggtaaatcatatccaattatagctttataattactttgtaatccaaatccattttcaaatgatacatgttctcctaaatctaatgtaattttttgctccataacatcttcataaaacttttttgatttatttatgtctttgacaattagcaatactcctccaaatttcatcttatcactatcctttctttgttataagtattataacttaaaattttgcaatttcactgtaaaaatcagacatattagctcggtatttttgaggagttattccacagacaattttaaaatctttaataaaatgtggtatatcatagaatcctaattcattacatatatacatcaatgaagttttattattgtttagaagttttatagatttattaatacgtaccaaacgagaaaatgacttcatactcaaccctaggtactgattaaagagtctgtttaaatgcctagaactataaaatacttttttagaaatttcttgtgaagatatgtttccagagttttgaataatcaactgaattgccaaaataaactcatatgagtattcaattttaatattagaaatcaataattcttccaactttaaaatcaatttatctatagataaagattcattaaatatttttttaatttctaaatctaatgaagtattaattatagaaaatggaacaactttatcaataagttcactttgctgtatacctataagcgggaaaaaaccagcaggttgaaattctataattagtataacatcacatctattagcaatatttcctactgtttttggtttagtagttggaccaaataatagactatgtaaccctgtggcatcataaaaaaacaccaaagttacacttccatgaggaataatcgtgtaattatcagaaattattgtttgatttggaaacgatatagtaaaattcgatatccaattttttaattgcatacaaggcaagagataaacaaaattgtcttcacaaactataagtgacctatttttatttataaaatgaatactttctttttttaacatatattatatcctgtcctatcgtgaatatttattaaagtaagaagaatccatattatctctatatatcattaactgcttttaataatagagatagtatgaatactcattagatatttaataaacaaataaattaaaataatcaataaaaaatatagtacttttatctgttattttaatattatagcacatttatagtatttaacttatatccactttacatatgtctaatttatatagttaaaaatgcttatctcaaatacaataattagtccttatacaattaaaccatctgaaactgtaatagtacgactactacttttggctgcttctggtgagtgagttaccataattatagtttgtccattgtctctgtttattttattcagtaaatctattatttctatccctgttttactatctaaatttccagtaggctcatcagcaaataaaatctctggttttccaactaaagctcgagctatagcaacacgttgttgctgaccaccagataactctcgtggtgtatgtttacgtctatcagttaaaccaactatatctaagatttcatctaattgatttttataatcttttaaatttttaccatctaataacaaaggaagcattatattttcctccacatttaaatttggtattaagttataaaattgaaatacgaatcctatatttctacgacgtattatgctcattttctcatcattaaaatgtgatatatcagctccattcatatacacttttccactcgttggagtatctaaaccacctaaaatatataaaagagtacttttaccagaaccagattgacccatgatagaaacaaattcacctttcattacttgtaaagatacctcttttaacactcgagttgttgtatttccaattttatattctttgataatattttttgcttctacagctaaactattatgtgtaattttcatattaacctccataattattcaaacttaatttcttctatcagtttcattttcttcccttttataataggcactatcgaacctattaaagttactataattcccaataacccaacaataataaatgttttaaaatctaaatctggtttcattgaaatttttggtcctgcaactataaagatagtttgaatctcaagtatagatatcacaataccaataacagctccaagtaaacctgaagtaaacccttcaatcaatgtcacttttatattttgtttatcacttagtcctatagatttatacatagctatagaacgttttttttgaatataattaatcagtagattattaataatacctactgtagcaagaagaaaaatgaaataggtcatcttattcataggagacaaaaaactacttatagtatttaaagaatcattattaaattcttcaactgtacgactccaattatatgtatctccaaataaatctcttatctgaatcataacaacatctggattgactgctgtatatactaaaaaaccataattagttttatcaaaatcattaactgcataatgtgatggtataacagcttctacatcatttgcacgggatttaaaactacctactattttataagaaaaatcatacttatcattagatagagttattgtatctcctatagataagcctactttttttagagtatcttcattcaaaataacagaacgtttatcattaaaagcttctattacttgtttttttatctcaaaatttgtataattgattccaaacatagagttatatagttttatattatctgtaccctctagtcttgataatgttacaccattaccagaaatctcattattcataacataaagaggtaatatttttttaattccatccatatgtctaacattttcaataaactcttcattcatctttccatctgcaaaaccttgtaattctgcgtcacgaaacacatctgttatataagttttgacaaagttaccaacaacacttattgcaataactgcagaaatacttataaatagtaaagtgatattctgtattatatttttgttatttttcatatttctagcagctaatttaccctcattccctaaaatatttttataaacaaactcaaaaactatagacatgatatcagtaataagaggaatcaacacaatagtagctacaattaatcctagtaatgaaaatccaccagctagatacaatgtattttcaggggatattcttggaagtaaaatagataaaataaacattatacttcctataaaaagtatagaacgatttgaaacattcttttcttctactgttcctagtacaatattttttattggcaaatggctagcttttttaacaggtatatatgcactaaatgaagaaacgattattgctactataacagatataatcactccaatgggtgatattactactggaattgatattccttgttcgagagaatttcctaacccatgaagcattaaatttaaaacaactacaccaataggaatagcaattaatcctcctatacttccgtataatatactttcaagcatcaatatacgagttacagttttttcattggcaccaatacttctaaatgttccaataaaaggaagacgttctaatgtaataaccttatagctgctgtatatgataaatatactaagggttaatgcaaaaaaacttattaaaaagaaaggcattgtcttttgtctagcatctgaaattatcttagtttcatttatagtatttgataccatatatttttcagtggaaagttcttcggataatttatttactagattttctgtcatttcttcttctgactctataagaactcttgtatatccactgcctttatttataatttttgatagagtctctttgggtagcagtgcatttacacctcttgtattcctcaaaaatactgtatcataagatgcaatatcactaacttgaaaagtataagactttccataaatctgtaaagtaatagaatcacctttttttattttatattttgatgtaaagcgatttggaagaataattttatcaccagaaaaatcagtaatactatcgccattttctaatcgtggcttgttgattttatttagttgacttaagtctgctgatataagactaaattcttcatagtatccccctttattataaatagcagagctttccaatacaccaacctttgattttatagcatttaaatcaggtatgtcttctaaattggttaatacatctggatttttactttggacagatatagtcgctgtaccatacataccttttgccatttttctttgtgcactttcataagataatccaattgagaatgaaacaaaaagtaaaactgttgataaaactatggacagtaacataactgctgttctaatttttcgttctttaatatttgtgaaaatatactttaatataattttcaaatttacaccttcttcctttatctaagatatttcagtataatatttttatactttaatccaaattgaatctctaatagactcctccatacttttatcattctatttataatatttttaatcaaatcacctccttaaataaaaaagattgataaactactatataaatataataatctatcaaccttaatatattttttatttgaccttaattaaccttaattaaataggaaaggtgatataaaatgagctacctaatccaggtatactttcaacagatatattccctccatgaacttcaataatttgcttcgttattgctagtcctaaaccagttccttctattttttgttttgtattgcttcctctataataacgattaaacaaatttgatgcttcttctcttgacatcccttttccattatcagatataatgatttcaattctttcatttaatgttatatgtacacaaactttagtatttttatctccatatgtaaaagcattgacaataagattactaaaagctcgttttaatagtgtacaatcaaaatcaaagttaatattatctatattactcttaaattcaactatatttgattcatattctggataatttaaaatatcaatggataattctttcaagaatcttactaaatcatatttatttttatttaaaggaattattccattttttaattgataggttaattttaaatcgtttataagtgtatttgtatattctatattctttaacatgattgaagcatatttatatactttttcaggtgaataattagtactactatctgtaagaagctctgcatacccttttattggtgaaagtggagtttttaaatcatgagttatatttgaaatccactcttctctcataatatcagttttattttgtatctcatcacttctatgaatttcttcatttaaaatatttaaactattatatatatcagcaaaaacacctttaatattaactggaagatagcttcgttttgaaatatcactaacagcagatgtaatatttgatatgcactttgttacccagtaaccataagcaattccagaaatcaaaattattaaaaatataatccctatgattgaaaatacaattgacttaccacctacaaatttacttccatcaaaaaacatattcactttagatatatttaatggaaaatatataatataaatatagtcatttttattatttttaattgtattaaagtatacagttccattacttgaattattttggttagctaatgttaataattcagaattagaataataatctttatgctcttttggttctaaaaacccataaactctatttccactagaatctaaaatttgcaaccacaattgattttctcgaagcttttctaatccagactgttttacttgtggcttattatctataaatatgatttgttcattaaagttttctgtaaattttttcggccagtcactacgaataaattccccatttggtttctgaatagtaataagtgataagaaaatacctattactgtcaggattaagcaaataaaaatcatgaaaaaaataatgtatgaatgaaatactgttttataactaggtttatgcatttaatcaactcttttcttaaacttttattttagtttgattgttgcttatataaaatagataataattattgatatgtaaaaatttatttaaaaatacaactatctacataaattatatttatataattatatgttatcaagctgtctgttgtatttaataaatccttttgataacatataaaagcaagataattttttccattaaataccttataattatacacaaaatctctatatacgttaaacagtatagagaaaattttcatagaaccatctttataggggatactttataaaagaataaaaaaattataatatataaaaaacttcataggagtgtaacaacatcagtaaagatatgaaaacactatataaaaattcaaaaatattaagaataatgaaatacttgaaattgcttatatcaagaaattttatataatataaactggtcaaatatgttataatattaaattgtgacaagttcatggaggtgtttatatgaaaaaacaaaagtcgccaattttacttgaaatgcttggactatttttgggttgtatatcaatgagtattggtataaatatgtttttaaaaccacatacaattgctcctggaggacttagtggtctatcattagtactaaacaaggttacaggacttccagtatcagctatcatgttaattataggtgtcccattagtaatacttgcttttagaattatgggtacaaaaaattcattaaaaactttatttggaacagttgtattttcagctatagttcaattaacagacccattatcaaaactaagatttactaatgacttattattgtcttctattgcaggaggaatcctagttggtataggtttaggaataatgtttaaatcagatgcttctactggaggaacagacttaattgcactcatacttagtaagaaattcccaggaataaaagctacaaaattcatgtcatgcctagatggaatggttgttatatcttctggtatagtaaatcgtagtttagaaactgctctttactctggtatagcactttgtgtattaataaaaatagcagatatgataatggaaggatttgaccattcaaaagcattttttattatctctgatgagcctgaaagtttaagacaagctataactgaagaacttgatagaggtcttactattcttgatggtaaaggtggatacactagagaaaataaagaagttctattagtcgtagtttctaaaaaacaagaactttatctaaagagattagttaaaagaactgaccctactgcatttgttattgttacagatgtgcatgaggttcttggagaaggatttaaaaatttagagaactaataaaaattaatattttaagtatatatactattttaattaaaatacgatttattcaaaaagagtgtctcataaactttttagttcatgagacactcttttttgtataaaatcaaatgcattttcagtattttaacaataaaaaacaggattatctatattttgagtcaactactttattgaaattttatttagaaaacaatcattactaaataaccaggatagatattaaatgattatatctattgttttttcaattcatattgataacaaggaacattttttacagtatttccagtatgaatttttttgatatactttcctgtacatttaaatcctaataaatctaatgattttgtagaattttggttttcttcataggttattgcaattattttatttaagtttagttctctaaatccatactgtattactctttttgttatctcagtagcaaaatcatgtccccaatagcttggatttatacatatacctatttctgcttctaatgctttaggatttatattattaaaccccatattcccaataactttattgtctcttttatatactatagcaaagtggccaattttcccttttttatagggatttagaaaaaatgattttataaactttcttgtatcttctaaagatttatgctcactaaatggtaaatgttttactactattttatttttataacagtcaaaaaaatcttcaacatcatctaatgatgcaggtcttagtatacaacttctagtttctaaggttttcatttgaggatattcagaatcagacatttctaatccccctttatacattaatctaaatatactgttcatatttaaaatacgatattaattatataaatgttctcaaattaaccttatctttatttttaataaaaactaattactatatgaatctttcaaatttacgaatttatctctatttttatattaaattacttgtgaaatatgtattctaaattatatgttattagatatcatgcttaaaaattctttggttgctaaggataaagatatatcttttaaatggcagtaacctatatttctcttaggtattggctcttttatatctaatttaaacaatttctcattttccaaataatctatgctaaattcttctataacacaagacactccaagatttatatacgcaaattctaaaagtaattcatgagaacccaattctatatccgggtttagttttataccttttgataaaaaatattcatttacataaagtcttgaatttgctttattttctagcattattaaaggcaatgtgtttaattcttccaatgatattttcctacctttgtattctatgtaatcatttgcacatacaaatatatcatgtatttcaatacactcaacaatatttagtgtatcatcttctattggcatgtttataattgctatatctatattcccatctttgagtaaagatataagttctctactcgttctatttattgtagatacatgtatatgtggatacttcttatgaaaaatttctaaatattttaacaagaaaaaacgtgcagctgtatctcctactcctattttcagagaaccgtattctaattttttaaatttatttattctatcttctcctgatgatatcaactttaatgcagtagtgacatgttcacttagaattttcccctctggagttaattttactcccttattgtttctataaaataataaagtatctaattgttcttctaattgctttattgactggcttacagctggctgtgacataaacaattccttagcagcaagagaaaaactcttattatttacaactgcattaaaaaccttataaagttcaagttttatattcatatataattactccttatgtcaaatattagtattatttattttacttataattatatttgaattataatatacatggtactaatatgacaatattaattctttaggaggattttagataatggatagattagttggaactgtttcaagaggggttagagcacctattataagacaaggagatgacttagttaaaatagttgttgattctgttttaaatgcgtcaaaaagtgaaaactttgaagttagggacaaagatgtaattgccgttacagaagctgttgtagctagagcacagggaaattatgctcacgttgacaatattgcaaaagatgtaaaagataaatttggagatgatactgttggggttatattcccaattttaagtagaaatcgttttgctatatgtttaaaaggaattgcaaaaggatgtagaaaagtcgtattaatgttaagctacccttctgatgaagttggaaatcacttaataagtattgatgaacttgatgataagggaataaatccttggtcagatgttttaacagaagaaaaatacagagaactatttggatataacaagcatacatttactggtgtagattatgttgattattataagaatttaatcaaggattgtggtgcagaggtagaaatagtatttgcaaacaatccaaaaactattcttaactatacaacaagtattttaacttgtgatatacatacaagacaaagaacaaagagaattttaagacaaaatggagctaaaaaagtatattcacttgatgatataatgacagcaagtgtagatggtagtggttacaatgaccagtatggacttttaggttcaaacaaagctacagaagaaacagtaaaattattccctataaattgcgatgaagttgtaaacaaaatccaaggtaatataaaagaaataacagggaaagatgtagaagtaatggtttatggagatggagcttttaaagaccctgtaggtaaaatatgggaattagctgacccagtagtatctcctgcttatacaaaagggctagagggaactccaaacgaagtaaaattaaaatacttagcagataatgattttgctgacttatctggtgatgagttaaaagaagcaatttcaaaatacatagttgaaaaagataataaatctgatgatttaacaggaaacatggtttctcaaggtactactccaagaagattaacagaccttataggttctttagcagatttaacatctggaagtggagataagggtactcctattatttacatacaaggatatttcgataactatacaaaatagtatgttttaataagatttaatttttttggattatatatattaacatgaaaatttattaaaacctcttaatagatatgacttttcaagagttatatctattaagaggtttatttaatgttcacagataagatatatttaaataatttaaacaagattgtcataaagttatataatcttaaaaatttatataactctaactcttatttatttctgaaataatatcactcttcaaaatttgtcttactggaataattacagcaactatactaatagtgatatttaaaataatcatacctatgtatagaggtgtatttattttaagaattggatttatatataaatatacacgttttaccataaaataaatcataaattgtccaataacacttccaattaccattataatacttgcatagaatccatataaaaaaccttctcttatcatcataagtaaaaacttattatccgtaatacccatagctcttaaaattccaaactcatgtcttcttgaaaaaattaagtagcttactgtattgattatatggaacaaacttattgcaagaagtacaaatacaataccatatataaataagagtttttgatttaagtaggtattatttttttcaatagcaatggtataatctgttacgatacatctttttacatcacttacaacactttttatgttctcagacaattcctcactgttactatcttctgtcttttttatacttactgaattataattttcgatatcaaagttatttttcatttgcccattcgtcataactatatccataccataatcaccaatgaaatatatgttatttgccatcacacgttttacagtagcagcaactacaaattcttttgttgtataatcattcttattttcttctttaaatttaacaatttcacctgttggtttcattgtctttggcactttaacttttattgtatctcctggatttatatcaactgcatcatacatcccagttccatccataggtagtctaactataaccttattatttttaaccatatcatgggtattaatctccccatctataatataagaatttaatccttctaacataccattgttataaccataaatatttgtttttaaaagatagccaccttcattttgctttgtacaaataccatcaaaaaaagtctttatcctgtaatctttttcaagaggtttaaagaaatttttccaaaatagttgttcttctttaatttgcatagctccaaataaatatcttactggatagacttttgatattccctcaacattgtttaatcttgaaattttatcttttggtatacctacatcaaaatctgttgtttgcatagttatttggtagtcagaatttaaaccatcatcagctttcattgtaagttcattattgtttttagtaagctgtatagagtaactagaacatagaaatataattccaccaagtgataatgaaaacaaaattccaataaacattccccttttttgagtcatgtatttatgagataatacttttgtcatgttagagtgttttacactttctaatattctctttttcttattagtaatcttaaagtttttcatagattctatactagagtatttattcaactgatgtacaacacgtacagcaattaaaattaacaacaataagataaataaaaagcctaaataaatagatttttcacttataaaaaatgctcctggaacaatatcactactcaaaaatatatgtggaaattgttcatatattgtagacgctactccaatacctaagaagcaacctataggaaatccaacaataaaaagtaaaaataactctaaaaatagtagaaataaaagttgtttattattagcgcctaatacttctaaaaccccatattgtgatattctctgaagtattgaaacatggaaaatactatatactgctgctgcaccaaacactccaacaagcaatataattgcatttgtatttagttctaaattttttaagaactcaaatatattatatttttctatattctttggtggttttactccaaattcaactgaaagaggccagtttatataagttttttcttttgatatgttgaattttttcataaatttataattttgctttttaatatttttattttcatcatattttacataaactatataagaatccttttctttaggctgcaaataatcgtttacaaatccctccatagcagtttctgggtttgaaagacttgataaaataccacataacttatagattttaccatctaaattgatttctgttccaatttctttgtttacatttaaattgtttagagaatatgtgtcaagtactatctctccatctttactaggaagagttccttttaataattttctacctgtcatgtctaaatatgaagaatcagcatttaaaaattctataataaaaggttcatctatctgatttttaggttttgtaacgccaagtctatctacaatgtattcctttgattttttattttttttaattttattaagttgttccttatctactttatagaaataatgataatctccactatcttcccttatcttttcaattctacttttgtctgcactatgaactaaagaaccaattcccgtcaataatgctactgatagtactatgcttaaaactatagatatagattgttttttataatgctttatatattgaattgaaaattttactagagacatcatagtacttcaccaccagtattcaccacaactccatcttcaatatggataattgagtcgcatacttgtgctatattttcattgtgtgttaccataagtatcgtttgatggaattttgcactactttcttttaataaacataccacttccattgtagttttactatcgagatttcctgttggttcatctgctaatataagtgcaggtttatttgccaaagctctagcaattgctaccctctgttgttgaccaccagatagttcgcttggaaattttaaacgcttatcccaaattcccaatgtcttcatcagcatttcaatatattcatggtctatatggtttcctttatctaatgtaacaggaagagctatattatcataagtgtttaatacgggcattaaactgtagttttgaaatataaatcctatatttcttcttctaaatactgtcaaatctttttttcctattttagatatgttctttcctttaattattacatcacctgaggttggattatctaatccacctataatatttaacaatgtgctttttccagaaccagaagttccaactatagcagtaaatgtatctcgttcaatttctatacttactccatttaaggcttttactttagtctcaccttttccatagtgtttcactaaattattcgtcactaatatactcatttaatttctcctttcaatacagatatatgttctataaaatattgtaagtgacgataattacactcatcctacaaagttagtttaaactcttacaattctgtaagaatatactaaaacaacatccacttcctagtttagattctactataatgtttccattttctttttctaaaattaatcttgtaagatatagaccaatccctgtgccattttggttttccacatttttacttctgtaaaatcttttaaaaatatcatttagttctctactatcaatacctattccttcatctttaatagtaatcttcgtatatagctccatttttattacagaaatagtaatcgtgctatctgatggtgagtattttattgcattttctaaaacatttacaattgcttctatggtccactttttattatgaactaactttatatctgaaaatggttcgagatttatccttatatttttagcttctgatttattaaagatagtactgatgctttgaataagagtatctttaattagtagttcttctacttcaaattctataactccatcctctaatttagtcattttaaataaggattgtaacaaccagtcaatcttaaaagtttcatttttcatcttttgtaaaaactccttcttctgtaatgtggaaatatttatattctccagaagttcacaataaatggttatatttgaaagtggagtttttaattgatgtgacatatttgatattaaacctttaatcgcttctttttctgactttgactgttctacctctatttctatcatatccttaattttttttacttggtgagaaatttttgacgctcttgtatccttcgtatctggataagtaacttctttaccttccaatatttgatttaacatcaaatttaattcatcatatcttctttgatttattttagtagatactataaatataacaactgtacatattataaaggctaatataaacatattattctacctcattccataaataacccattccataagctgtttttatatattttggattagatgggtcatcctctacttttactctaagtcttcttatatttacagatacaatattatcatcaacataattttcttcgctgtcccaaatatggtgtaaaatttgttcctttaataatatctgacctttattttcaattagataacttagaagcttatattctacagagctaagttccaaacatgctttatttttatatacttttagtaacttttggtccaattttattccattggaatatattactttattattcgatttttttcttattgctactttgactcttgcctttaatacagataaagaaaatggttttgtaatataatcatcaagccctatttctaatccttttacttcatcaatttctgagtctcttgcagtaagcattataattggtatatctgacttttcccttattatttgacatacatcaaatccatctccatctggaagattgcagtctaagattataaaatctatatttttactattaaatatatttaatccttcttgttttgtataagccttaaatacattaaatccatcattctcaaatgcataaaaaagaccttcatttaagtttatatcatcttcaataattaataagttcaattttactctcctttagattttttagataaataattattttcttgcattatcatactaaaaatattttaattttatttatttcactaaaaagattgtatttaaatttgttttcaaaataaaaacatcataatcaagcatatagttatatatttcccaatttaattacgcttaaattgaaaatataacgttattcttatataattaaattatacaacaataaagttatattttttaaatatatttttactagggggaatagaattgaaaagggttgatgagagaaatactatgtttgcaagagcaaattacaaaaaagatagtactgcttataatgattattataagaaaaatcctgacaaaaaagaaattgatgatagtataagaaatagaccaaatttatgtagtgaaggaacaatgacttacaatgagttaaactctccaatggcaagtagtgcattcgattttttatctgatatcaaatctttatgcgaaggaaaagtttctgatactaaagtagatgtagatgcaaagtcaatgacaaaaaaaattaagggtcttgcaaagcagtatggagcttctgtagttggtataactaaattaaaagactatcatatttatacaaataggggtagacatgaagaaaattacggtgaagaaattaatctaactcataagtatgcaattgtatttggatgtgagatggataaagaaatgataaatagagctccaatgatatgtgaagttatagaaacatcaaagtgctatgtggatgcatctatcgtcggcatgattttaagttactatataagaaatttaggatatgatgctagaaatcatatggatgctaattatttagtaatgcctgtttttatagctcgtgatgcaggtttaggagatataggaagaaatgctatacttacaaataaagattatggctctagacttagattaggtgttgttactacagatattcctcttttagaagatgaatatgttgattttggactagaagatttttgtaaggtctgtaaaaaatgctcttttaactgcccttctcattcgctttctaatgatattaaaattggtgatgatggaaaatataattgggtaattgaacatgagacatgctatattaaatggagatatttaggtacagattgtggtatgtgtatatctgcttgcccatttagccaaaatctcgaaactataaagaatactacttcatttaagggtaataatgagcttattcaaaaagctttagatgagtatacttcaaaatttggtaaaagaatatttatacctggaaatccatcttggttgaaataattttatttaataaagaatctgtactagaatttatcataggacaggttctttattaaatatataaatttttaaatactttttctcgtttataacaattcagcaatgtttttagtctataattgacattataaaatattaaactaaaaggagtaactgtatggaaaaaatattagtagtagaagatgattctatattaaataaaactctatcatataacctaattgaagatggatatataattacttcaaaatttacagctaaatctgcactaaagtctatttttgaatgtgaatttgatttaataattttggatattaatttaccagataaaagtgggtttgaattatgtaatgaaataaaggaaaattacaatataccaataatttttttaactgctaatgatatggaatgtgatatgattaaaggctatgaacttggagctttggattatataacaaaaccatttaatatcaatttatttaaacagaaagttaaagcttttttaaatcatcttacaacaaaaacaaaacaagattactatagggatggatatcttgaaattaacttttctgagttatctgccaatataaatggaaatcaaattatatttacaccattagaatatcgtactttaaaactgcttactgaaaatcctaaaagtattttaacaaggaaagtacttttagaaaaactctgggatatagatgctaactttgtagatgaacatactttaacatctgttataagtaggattagaagcaaaattgaaaaagacaatcttaagtatatcaaaacggtatatggtatgggatatatgtggttaggtgaaagaaatgaattttaaaaaattttcttttagttctatttatttaataattgctgttggtataatttttacagctattttatttaatatttcaatttatctaataactgatgatttaaaactaattgctctattattaatatatacaatagtactttgtggatttatagcattaataatatttttacttcataaaaaaatagttatattttgttctaaaatatgtcacactttagatagtatgatgaatagtgaagacaatattgaaattgaattagaagaagaaactattttatcacgtatcaatcacagattaattagaatgtatgaagttattcaagaaaatcgcaatagtattgctatagagaaagctgatttacaagaactagtttctgatctatctcatcaaattaaaactcctattgcaaatttaaaaatgattaatactactctactaaatcaaacatttaaaacagaaattcaaaaggattttttaatggatatggaaaaccaattagataaattagattttttaatgcaatctatggtaaaaacctccagactagagacaggtataatcacactatctaaaaagaaaaattcaatttatgaaacaattgctacagcacttagtggaattttgtttgatgctgaaaaaaagaatattgaagttacagttgattgtgacccaaatttatatataattcatgacaagaaatggacttctgaagctatttttaatatattagataatgctgtaaaatacacaaattctaatggtaagatacgtgtagctacagaatgttgggttatgtatacaaaaatagatattattgataatggaaaaggaatatcagaaagtcatcaagcagaaatctttaaaagattttatcgtgaagaagatgtacatgacatagaaggtattggaataggtctatatctttcaagaaaaattatatctcttcaaggtggctatattaaagttacatcagatattggaaaagggtcgactttttctatcttcttacctaataaataaatttttaaatattttatttgtaatgattctgcaacattttgattttatactgtatttacaagatgttaaggaggtattattatgagtattttacaagtaattaatttaaagaaatattatggacaaagttcaaacattacaaaagctcttgatggtgtaactctatctattgaaaaaggcgaatttatttctattgtaggtacatctggtagtggcaaatccacattattaaatatgatgggaggattagataatcctacatctggaaaggttattataaagggtaaggaattatctactatgactgatgaacagcttacaatctttagacgcagaaatataggttttatatttcaaaattataatcttgttcctttacttaatgtatatgaaaatattatcttaccaataggattggatggagagaccatagataaggattttataaatgaaattataaatatgctttctcttgaagaaaaattatatgatatgccaagtaatctttctggtggtcaacagcaacgtgttgctatagctagagcacttgtaacaaaaccagctattatactagctgatgaacccacaggtagccttgatagtagaactagttcagatgtactgagtttacttaaagtgacaagtaaaaaattcaaccaaacaattgtaatgattacacacaataatgaaattgcacaactaactgatagaattattcgtattgaagatggaaaaattgttaactaggaggtgtagtatatgtttagaaataataatcgcacatttataagaaaaatagctttaaatgatttaaaaattaataaacttaaaacatatctttcaggtatcattataatgatttctacatgtttattattaacagtgaccttagtttcatataatgcttctgtagatttagttaatgcatctccatatcatgctatatataaatctgtagatgaaaaagcaaaaaatatactatataaagataaaaaccttagtggcgtaggaacctacaaattaattggaagtaataaaaagacagactgtattatgtcgattgtttatgcagatgatacagcaattaaacttatgaattttcaaccattgaaaggcaaactacctacaaataaaaatgaaattgctatttcagaaaaatatttacaggaatttggtttagataaagatattggagatagcattaaattaaattattatgatgatattacgaataaagaagttcaatgtgattttattattgttggatttctagaaaattattatcaagataatgccaagcaatactatacagtcgtttcaaatgattattttaagaatatagcttctacacctttacaaaataaaagtaatacttttgacgagtcaagacctgatactgtagatgtattagttaaactatcagaagaaaatacagagaaagattcagcttcaattaagacacagttaaagaaaattggtttatctttaggtattaagaaatataatatatacttaaatgataactatattgaatcaaatttaattgatggtgagcagattattacagttttagtagttggaatagttgttcttttttctagcgtttttgttatatatagtattttttatatttcagttgttaattcagttcagatgtatgctaagttgaaatcgttaggtatgacttcttttcagttaaaaaagactatttctctacaaggaaatattttgtcaattatttttattccattaggggctatagcttcttgtataattgcttacataattcaaccattagcatggcaaatgatagctgatttatttataattttaattttatcactggtaatgtttttaactgttagaatttctttatttaaaccagctagaattatttctaaaatatctgctattgaagccatgcaatatacagaaactaaatttagaaaacaagcaaaaaattttagttatataaatataaaaaatctagcattaaagaatatcgagtcaaatagaaagaaaaatttgattgcattaatatcgctaagcattagtggagttttatttatttcaatcgctaatcttgctaattcaatagatttcaaaaaacaactatctcaacaatttgtctataacgaagattatataattagcattaagagtgataacttatatgagcatattacagaaatccaacaaaataatccactaacagattctcttaagaatgaaattaaatctattcatggagtaaaaaaattaattgaatccaaatcaattaaaagtaatattatagaaccttacatcaaagatagagacgaaaaacaatttattactctaattaaaggtattacgcctgaactttcaaaatcacttgaagaatatattgtcagtggaaaaatagactatacacatttagattcagatagtttaattataaataaatatagaacaaaatcttatggattaaatttaaaagttggagatacagttacatttaatatctttagtggaaatgatattattaaaaagaaaatgaaaattataggaatcattgacaattccaatacaggaggtatgttttttgcttcagacaaaactttagaatctctaacaccatataatacaaatttagatttttctattttaatagataaaaagcattctaaagaagttgaagaaaagttgttaagtataattcagaaaaattcaaatttaatgctttattcatatgaagatgattatagaatgattactagagcatttcaatatataattatagcttcatacatttttgttggtttaatttcttgctttggtatactaaatatgaccaataccctaataaacagcgttttaattagaaaaaaagagtttgccttacttcaagccgttggaatgacaagaaagcaactgcgaaatatgctttatagagaaggtctaaacataagtatcaaagctatatgtacttcaagtatactaggttattttggttcaaatctactttgcacttttataaaagatgtaattagattagactttattaattttaaattttctatatttactattttaattttttcattcgtattaattggtatacaagttttagtgactgaattacttataagaaatatagaaaaaaaatcacttacagaacgcttacgttctcagtaagaatgtatataaaaaataaccattttttatacaagttttaacataattttttaaaagctaaaaggatagaaaattttgactttacataattttctgtccctctacttgtttttattttatacagatacacttccttatatctccaagcaacatcaccagagacataaacaagcatattccttattttctaaatatgtcaattgcatgacttgtaactcctactaaatcttcacgttcacaagtagcaaggtgatattttaaatataacgcaaatgcatcatcatccatagagtctactgcttcacgcatatacaaagccaaaccatctgatgcgacataatgcagtctagttacattaaatgcagacatcaaatcatcaatgttttctttacgtacaagctcaaacaaatcctttggttcagacttagcagcaaatgtctgtggatcaatcaaacctttttcaatatattcagatacattaatatttcctctatggaacccctcgtcaatgagacagccatcagatataacgtatgcagcaaaaaccacaccaccaggttttgttacacgaattgcctcatgtaaagcttgttgtttatcttctttgttataaagatgatatagtggtcctaacagtaacgtaatatcatatttattatctgggaaaacagataaatccatagcattaccctgagtaatgcttatattttcatttgattgagtatttttatggaaaacctctatattatgttcgactaattccactgcgtcaacatcatatccctgacgtgccagtgtgtgagaataacgaccagttgcagcgccaatttcaagcacacaatcacctgattttatgtacttatcaatgtaatgcatagtagtgagaaattccaccattccatgttttaatgcaagtcgactatcttcatcataagtattataaaagtcaattaagtattgttttgtttccataatctcacctcttctatattagttaataaacatcaaatagacaaattccaatctggtttttcttgtcttataaaagctgttaatatatttttcaacattttttcagcactatatctatctaatgttaatttttttgttgctgttaagacagctatgccatgagtataaagaaataaatctaaaaatattacttttgcacattccaactctattccaatgctttccgaaaaaagtcttgcctttttttcattgtcaatttctttataaaaatcattcgcctctttcatcatcaaatctaaatcatttataaataacaacttaaataaatacgtttcttcttgagcaaattcaatgtatgaaagcggaagcagtaaataagggcttacacttttagaattacgataattaacaacatactgattataatattcatatgcaaaagcaagaaattcattttttaattcattcatgttttcgtaacaagtaaaaattggtcgagtggaacactgtaatttacttgcaatactcctcgcatttacagcttcaaatcccacttctcttgtaatatccaagactgtattcaaaatcatttcttttgttatctttactttaggtggcatatatgttcacctctccattaaatttttataaaacacatatgttatataactatagtaacatatcaagaaattatgtcaagaaaaagctttgcatttttttgcaattcctaaaacttataaataaaacatgagttgcaattaatctattaatagataacagcaactcatattttcctttaaatactcttctttttgtctaatatttcatatacacaatcttctattgaattaatatctttttcttttctttttttagaatcaattaaaatgaaatacagtataaaacctacagcaagtccccatgttccgcctttagcagcaattacacctcccataagtccaatcaatcccttctcaacacctgtattacatagctccattgatagctttgtacataaatatccttgaactaaaagtgttactgacaatgctaatggtataagaggtgtagcaatctgcgcaattggataaaaacagataaaaattgctgaaacccatactaatgtacccatgccactaaaaacagactgcatggcttcctttccaaccttgtacctttgagcaacacttcctgtaagtgtcgcagctaatggaccgcacattggtatatatggagaaaagattgccataaaaatatttcttatcccacttataacattagacctatttgaattgaaatctatatattcatcttttctattttcactttcagaaagtactaagttttcacctgttataaaatcaccaaaggcaattatgtatatcataaaagccattggtatcccttgtataaataacattacacttggaaaacctattccaaaaggagatactgtatttatcagatttttaaaatctactatgtaaactaaattgtcaaaactaaatctaggaatttctatttctttactaaatatacctactattaaactcactaaaatagctgatactacaccatattctcctaaatgaaataaaaatttattcttaacttttagagtatcaaatctttcagaaaacattacaaaacaagcaaccaaaattcctactgttatagatataggataagaatcaaatctccctttaggattaaactctgatattatagtcgatataccgacacccattagtattccacctttaatagaatttggtatcttactaactaactttccagctacaccagttatacccattaaaataaatattattcctaaatctatttgtaaagctgttaatgcttgtattctttcaatgcccatgctgaactttaacaaatatgcagttgtaagagttatagaagctgtaatccagccaggtacaactgggtctcccataaaaacatgcaaacagtataatattgagttaataatagccatactccatgccacttcatagggtaatcccaaaatttgtgtactaaggccaattgtgcctaaacttgtcatacttgatattataccttgaatagcttctggtttctcaaatctgtaatgtataaatggaattcttatcttaaacattccaaattttatatgaggttgttcccttctagcgagtctttccataacttcactccacctttcaataactcttataagtttacaactttataattgtttataaattgtcaatgtcattaaaattagtatataacatgcaaattatataaacaataaattaaatctataaaattgatagattttgtgcatatatagaaaaaccgcttcatttttagttacttaaatcacttaatattagttatttaaatcacttgataaaagttttttataaaattcaatagttctattccatgattcaaactgtccttttgaatttccttctacagttccacctgaagaaaaaatccctccactcatactcatacataaagtctcctttagaggcataatatatggaattggtaacggatgacccatattattgtatgttaataattctacgttatatggataattattttcttcaaagatttctaatgcctctaaacaagcttcataactattccatatgttatcttcttttccagcaatcataagtatatctgctttggaattttctatttttattctagcctcttttctattctctgctcttttaagacttttcttataagtactattaaatccaaatggaataccttttgatatattttttttctgttcttcaaagaatatatcattgtctactttgatatatggaaatggctctcctttatatgaccatgatgaagtatcatttccactcatcaatccattaagagcttggaaacaataaatgtgaggttgtgatactacaacctttttaatttgttcatatcttgaagcaagtaaaaaggccaattctccaccctttgatgtcccatgtacaaatatttctttagtactggtaatttcattttcactaatccactcaaatactttttcaaaatattctaatggaacctcttctaatttatctggtaacccttctaaagcaaagtatgcaactgttagtacattgaatcctctagatgcaagtggagctgctaaaaggtctagagcgtctaaatttccatcagaaccacctagcattaaaattgttttattattagaattttgtttataaaataattttcctataaactcatcagatatgtattttgtggtaatatcttctgatttaaatattctctttaattcaacttcttttctttcagtagaagtttcaaatatcatattcataattattggtttatcaatagatatattttctgcaaaatttttaccttcagttttagatttttccagcgaataaattaaccccatacaattatcagccttataagtaccttctataggttcaactaaatctaaatctacttctcctttttcatttgaacaaaacactccataagatgaaaattcttctcccttgcaccatggaaattccattttcacacttattttaagtttagtatttggaattaagtctgaaaccataatcttaagtctttcatccacaaatgattctacattgtatacatttactttcataatctatttctccttataataattatttatgctttatatataaaacaactttatctaatacaacataaataaatttttaaattaagacaccatattgactatttcattttatcaacatatttcatttttgtcaatatattgtcttttttagtaatttaaaattatgtagtctatatgaaatccagttgatttttggctaattaaagataggaatgctattaggtttaaaatatatctattcaaaataaaaaaccactcattttaagaatggtttttaatataaactatttgttattaataaggatatttttttatttaaatttatataattgaacatctaatatttaatgtttaataaaattatgcatttgcaaaagtatatatggcattaactcttgctacatataaattctcatcactacatccaatatatctagcatatttttcaatcttttcttttgcattttcaacatcattttcatcgctctccattaactcatttatataaatatccattaatgacgctttatattcttttatatcatagcctaaaaattcagtcaatctctcaatttccttactaaaatctccatcttcttttaccaaaaattcgtatacatcttccctatatggatttaaagttattatttgttttactactttgcattcgtcagccttcccaataaaaccatctttataattattaaataaggcattagatttttttatagattcttcatcaatataagaatgtaccgcagttatacgattttctataagggcatctacaacagcataatgaattttaaaacaatcattgtataaataattgctcattttctttattgtcgattctatttctaagaagctagcgtgcccattttttttatttttatttggtataataaaagttttattcaagttattaaaaagtctcttaaaatctaaatatttttcacaataaacgcttttaaaggtatcgatatctatagttataattccaaaacttactatagtctcaattcctttcttaaaagactcttctatatatttttctcctaaacttaaacctctatcagatatttgctttagattttgaaaactatttaaacaatctctctcaaagtttttagatatttctaaagcatataatttaaagattttccttatcttattataattattttttgtatcatcaaatctgataatagctccatttacatcaaaagtaatcattgagttttaacctccccattagtttcatcaataaaataaatttaatataaactttataatcataatattaaacttatttatactataattattaatttgatgataaaagctattttccttctaaataaaaaatttgtctaaagtttctaaaaaatttagacaaatcttaggttattattctttaaattatttttaaattattccaaatacaccaaataatattggtataaatatagctggtaacaaattagctacttttatattcgttaatttaagtacatttagaccaagtcctataattaataaacttccagctgctgtcatttctgtgactacaggatcacttaaaaatccatttaaaaatgatgctcccacacatataataccttcatacaaaaatacagatattgcagaaaacattacacctatacctaaagaagcagtaaatataattgaagctattccatctataacagattttacaaataaagtatcatgacttcctgtaagaccactttctaatgaaccaactactgccatggctcctatacagaataataaactagatgatataaaaccctctgctatagaatcttttttatttcctttagaaaatttactttgtaaaaaagcacccaacttatttacccatttgtcaatatctattaattctcctatcagagcacctacagctacggatattattgtcactaatgtgttttttccttctagtgctcctgatataccaatgtacaatacacataaggcaattccattcattatagtatcacttactctttgaggtaatcctccttttattataagacctactatacatccacctgcaattgctagactatttgctattactccaaacattttttctcccctcgattagctaattgaaatttatcctattattaaaacctaagcatctatactttgtattggatattttaaatattccaaaaattcttcaaaaccttttctagatatatttacagttttagtatttatgttaggatgaaaatttaagtaatcttctttaattacatctttatctatgtaaagctcaacttttctttctgtatcatttattaatgaaaaaggatttacacttccaggaagaagtttaagtacattgtatagtctttcaggtgaagcaaacgataatctagaacttcctatcttatctttaagtgagtttaaatcaacttgtttttctcctttaactacaataagataatacttatttcctttggcatttcttaaaaataaatttttacattgacacccctttgttattccatctaaaatgactaattgctctgctgtatatacagcttcatgctctactacatcatattcaacatttaatttatccaaaatatcatatattttagtttcattcatgctagattcattttcatcttgttcttttttattatttaaatcactcatacttttctccttaaacacttcatcataatatcattgtgaggtattattctactatagctattgctcttactggagctccatcagcatcattatacttaaatggtgctgctataaatagaaatttttctggaacattttctaaatttgtaagattttctatgattatttttcctttttcaaataaaatatgatgcacttcaaatactgatgtgttatatctatccactgatagcatatctattcctatgccttttatattagtattagctatatagtttgcagcttcttttgttaatgtaggataacctacatagtactgctttttatcccaaaattttgaccaacctgatttaaatattataaaatcactattttttatttcatcttcatatttttttagatattctaattctatattctcatttcccttttcaagttccaatacataagctttcccaacaaaattttctatatccaacttatctagggtctcacctttagtatacatatgtcttggtgaatccatatgagttccattgtgagaaaatacactaattaatgtttcttgataaccattttcttcaataatagctactttcttgatatctggtctattaggctctgcatatacaggcatgtcattatgtgtcacatgagttaaatcaaaaaccttcatctttatataccccctatgtttttattttctattatatacctaaattcattttatttctatcagattttattccattatataccatactactatatattttttataaacctcaagggatttaccgaaaaatcttggaaagaattatcagtaaatataacatcttcacccaaaaaacgtttataccttccttcttctttctttaaagtaattctctgtttttgtgaatgattattaaaaaccattatcttaagaggaggtttttttctattagtctgcactctttttaacatgtattttatgtgcatatcagcttcaggaaatgaatatccacaaaatattaaaaggtcagtatctcttaaagttttttctgtttcattccaaacattacttaaaaatatgtttgacatattcttaaaatatgttggtggcactataataggttctgttaactcaccacactctaaacattttgtctctgaactattttcaataagcttcatgacaccaccttcatgtggtgtaagagttacactattacaaatggggcaataaagccaattcaatgacccatgtatcttatataatttgattaatggttcttttggttttctccaatttaactcctctttaaaatttgtaaactccacaccataatcaagcataattggcaaatcattcttatctcttaatccagtaactgtattgtctatatgtatatcataatttgcactaataaaagtagtatcaagaagcaaatcattttccaaaagattttcaactaaaagtttatgatatttattatctgttctaggtgtattatgaattgcttcagccattagcagtattaaatattgtcttaaaaaacgtatactatcacttctgttatttagattttctagtccaaaatttctaaatgcttcttttctttgttctgctaagtctaaaagacctaaaacttcttcaaaggtaggaaaatttgcattatctatattatcttttactatatcaatattgaacatctgtttaaagaaaatatacaattctctattcattttggtattataatttgtgggatttagttttttaaaatattcgctaaaaagttcattttgaataggtagattctctgctgctgaagctcctgctcctaaaaatattgctattttcatatagttcctcctaatataaatattactcctatttttatatccattaaatatccatatcatttattttatgatacaacaataaagctgtcttttactagaaaaaatcctattacaagacagccttatattatattaaatctttaataattcgtaaatagaaagagcatatatttgagtagcttttataatatcctctactattaagtattcattagcttggtgttctgtttctggttttcctggaaaaatagctccaaatgcaacacaattatctaaagctcttgcgtatgttgctcctccagatgaaagtggtgttccatcaagaccagtttcttcttcatatacttttctaagtgtcttaacaagaagagtatcttctggaacatagattgaatccaagaaatcatattcttcataatttaaattgtatttatctgtcattttctttaactcttttacaaaatcatcctttttgtatgttactggaatccttacatctattcctgcaaattctttttcgttatcaatagttactctacctatatttactgttagtttacctgatacatcatccttgcaattaggaattatattgtttccattagcatcttcaccaataacttctgctaaaaacttaattatattagaatctatacctatattattaagagctatacaaagtctagccactgcatttataccagtatcacttgctgctgaatggacactttttccaattatacagattttattaccttcaacagtatactcaaaatttaatttatcaagttctttttttaatttatcagagtattttccaatatagattgctttacctggaactgcatttaaagcctttccaactgacaactctatatcacttttgctatcacaagtcaaatgaacttgtaaaagacctttctctgcatttgttattgggaatctagaatctggagtaaatccatagtttggtatttcttcattattttctttatatttatttatacatctccaaagattttcttcatcagccccaaaaatgaatcttatcctcttattaaagtctacatttaaatccataagagctttcactgcataaattgctgatattgtaggtcctttatcatcttgtgttcctcttccatacaatttaccatcttctaaaacagcttcaaatggagggtaattccagctttctaaatcaccttctggaaccacatcaacgtgaccaagtatacctatcattttttcaccttgtcctatttctgcatatccataatatccatctttgtatactgtcttaaatcctaaagatttacataagtctaatatacctcttaaagctttatctacattttcaccaaatgggcaattttcagttgcttcagatataacactaggtatttttacactttcttgtattgaagaaatcatttcatcttgtagagaatttactttttctttaatttgctctttcatattatcacccttcaattttcatcataatatactaataaatattttgacctttttaaaaaaaaatatgcttattttttcagtttttttataaattcaatcgcttttaaagtccccatttttgaatggtcaaatgtaagtccaccttgaaaataaacattataaggaggtcttattggagcatctgcacttaattctatagaagaaccttgtataaatgctcctgctgccattatgacttcactttcgtatccaggcatgtcccaaggaacaggttttacataagaatcgactggtgcagcttcttgtataccttcacaaaaacttattacttcatcagcattattaagtctaatacattgaataatatcacttcttaagtcatcatattttggtaatacatcatatcctaatttttcaaaagctcttgagcaaaagatagctcccattacagcctgagatactatataaggcgccaagaaaaaaccctgaagtacatttctagttgttccaaaagtaagaccacattcttttcctattccaggagaagtcattctataagatataagctcaatcaaatcttttctaccagctatatatccacctgtcaatgcaagcccaccaccaggattttttattaaagagccagccataacatctgctccaacatcagtaggctctttggtatctaaaaactcaccataacaattatcaaccattactatagcttctggtttaacagactttattacttctatagcttcttttatatcactaattgaaagtgattttctccaagaatatccttttgacctttgtatcataacgagtttagttctatcatttattttgtttttaattccttctaaatctaagtttccatcctctaaaaaatctacatcatcatatgtaacaccatactctttcaatgaacctttttcttctcttatgcctataactccctctaaagtatcatatggtctaccagtaacagataaaatttcatctcctggtctaactataccttgtatacataaagtaagtgcatgtgtaccatttacaattattggtcttacaagagcatcttctgtattaaatactttagaataaatttcctctattttttcacgaccaatatcattatatccatatcctgtagtccagttaaagtgcatatcacttagtttagattcttgcatagcttttaaaactttatattgattatattctcttatttcttttatttcttcaaacttatcttttatttcttccattatttcttgcgatagtttaaaagtatcatcatctattccatagtagtcttttaataattcttttgtctcattaagcattttatcacctgtctctttattattttatttaaacatgtaaaggagactattttactaaaacaaataaattatagtttataagttagtataagtctcctctcaatcatcttaaattaaattaattatctatctgttgttattattattgttgttttggttttgatttgttagattaatatactttccaggttgtatagttgatacagcatgtttataaatcatgttttgttgtctattatccccttctattaatattatataactatcaaacccctttacaagccctttaacttgcactccattaactaaatatatagtaacaggtatcctttctttccttgcattatttaaaaacaaatcttgtaaatttaaaactgtatttttcattagatttgtaccctcccaagattaaattgaacttctaaaatattcctaccttatattctatataagttatgacaaattttcaatattaagttgtatacttaaaaatttatatattattttatagaatctttaatatataagattatttcattttttaattcgtctatattttcatattggtctaaatcaaaccatcttgctgttttatatcttttaaaccatgttatctgacgttttgcataccttctagaatctcttttaattatttcaatagcttcttcgtatgtatattctccatccagatacttcaatatctctttataacctataccttgcattgatatcatatcttttttaaatcccatacttaaaagtttttttacctcttcaaccaatccatttttaatcataatatcaactctcatatttattctttgatacaaatgttctctatctctatttagaactattattattggttgatattcttcattaaattttaaatcacttgaaaaatcattcattttcttaccacttagacaaacttcaagagctcttatgacccttttagtattgtttttatggattctattagcagattcttcatcaagttcttttaacttattatgcatgtaatctattcccttttcagcaagctgtttttgaagttcttctcttaattcattattggcatcagattgtgcaaaatccatattatatattaaagagtttaaataaagtcctgtgcctccagttactaaaacacattttcccttttcatttatttcatgtatatatttttttgctctttgttgaaactctgaaactgaaaatggatagtcaggcttaacttcatctataaggtaatgcttcactccttgcatttcttcctctgtaacttttgcacttccaatatccatatattcatatatttgcatagaatcagctgaaattatctctgcatctatatcttttgctaattttattgacaaatctgtttttccaacagcagttggacctgtaagtattataagtggtatttttttcataacattcctttccatatattttaaatatccaaatattttacataattcttttaaacattttttctatttctgtcttagatatttcgaccattataggtcttccatgagggcatgtaaatggattctcacacttttctagctgttccaataaactttttatttcaatatcgtatattttatcatttgcttttatagcagacctacatgccatagatgcaaatctctctccttttaaatcataattacttgtaatttcttctatattatcaattatttgaagtataaatttctcagtttcaggtactccaaatatagtaggaacacatcttaccattatatgattattgccaaaaatttctagttcaaaaccaaatttcataaataactccaagttattttcaatttgaagcatatctacatttgatacttcaataaccactgggtctaaaagtatttgcatattgatatcttgtctatagaacttctccatatatctttcatatagtattctttcatgtgcagcatgttggtccaacaaatacatagaatcgtctttgctcaaaattatataagtattaaatacaactccaattacagaatatccatataaggaaaacttgcgttttgaactacacaagtattcttcttcactgtccttaatactatctcctaagtaataatttccttcatttttaattccatcaacttgaaactcttcttgtatattatcatttgcactatcttcacttagataattaatgttttttacatcatcttctacacttgcatttaggacttcacttactgattgaaattcatttattggtttttcacttgataaagtcacaacttcaatgacttcatccttatctttagtaatattactatttttaggagtagattctaataaatcattatttcttaatttataatctgtacttttttctctactgttaatagcgattctaggttgtgtttttttatcactataagtagcatattttccaataagatttgagtgtattaatttaacctttaaaaaatctctaagttctatatacacttcttgttctttttcaaatttaatttcaagtttattggggtgtatatttacatctatacatgatgggtctacttctatatttaagaagcacactgcatgtttacctattggaattatagacttataactttctgttattgcatctatgattattttactttttacaaatcttttatttatatagatatgttgtaagtttttatttgaacggtatatattgttattacctatatatccattcattttaaagtgattgcacttaaactctacatctattatattttccgttatttcttttccatatatacttctaatagtgtttacaagttttccatcccctggagtatttaacatctgtttattgttatttgtatatttaaattgaatgtttggattacctattgcaagtttatttatcaaatcacttatgtttatagtttctgcatgagtagattttaaaaatttctgtcttgctggtgtattaaagaaaatatcttttataatgatggtagttccattagtagaacctattggttcttttgatattatttttccgccttcaacatatattttagttcctattatttcatctttagttttagtcgtcatttctaattttgatacagctgaaatagatgccaatgcttctcctctaaaaccaagagagtataaatcatacaaatcatcaatttttttaattttactagtagcatgtctcaaaaatgatttttcaacttcacttgaaggtattcctattccattatctgtaatcttaattagactttttcctccatcaattatatctatggaaattttatttgcacctgcatcaatggagttttcaataagttcttttactacagaagaaggtctttctacaacttcacctgctgctatcttatttatagtcaaatcatctaggatgttaattatatttttcatttttacacctctaagattttatttcttttgcttttctttgaagattataaagagagtttatagcatctaatggagtcatatttaaaatatccagatttaaaatttcttctgatagtatatctctatttacactatcaaaagagatttgagttaaggctacttcttttacagaatcttcttgattaattttctctttatcatcattttgcttcattaaagcaacttcatcatttaatgctttaaatttagaatttaatttatcataatccttttttatatgtttgtagtcttttactataagttcatgttctatttttagagattcatatttattcttaaaattactttgatttaccttaactaattcttcgtccaaattactattaattatattattgttttctttatctccatttattgcaacactgttgtaaacatgatttttttccaagtctttaagtatatattttgctctttctatgacttcgtctggtaatttagctaatttagcaacatatattccataactcttgtctgctccctgaggaattatttttcttaaaaatattattccttccccatcttctttgactgctattgaataatttttaacctctttaaactcttcttctaaatcagtaagttcatgataatgtgttgcaaataatgtcttacatctaatatttttttgaatatattccactattgaccatgctaaacttatcccatcataggtactagttccacgacctatttcatctaatataactaaacttctctctgttgcattttttaatataagggatacttcattcatctctaccataaaagtagattgaccttgagataaatcgtcactagctccaactcttgtaaatattctatctaatattggaatatcagcagactctgctggtacaaatgagcctatatgtgccataagagctattatagcagtttgtctcatatatgttgatttacctgacatattaggaccagttattatgttaataatgttttctccacgatttaaataagtatcatttggaacgaaattctcctctcctactatattttcgacaacaggatgtctaccatttcttatatcaagtttattattttcatttattgctggttttacatagttatttatatgtgcaactgttgcaagggacacaaaaacatctatattagctatagtcttagccactttttgtattctatctatgtttttatatattgtatctcttatctctacaaatatctcgtattctaaagatttaatcttttcctctgcatgtagtatcttttcttctatttcctttaattctggagttatatatctttctgcattactaagtgtttgctttcttatatatgtctcatctagctttgcctgtttaaagttggcttttgttatttctatataatatccaaaaactttattaaatcctatttttaatgatttaactcctgttttttctctttccctgttttctatttcctttacaagaaaggctccattcttagaaatctctcttagttccttaagttcatcactaaaatctgatttaattatgtttccatcttttatggttatcgtaggttcttctagaatagcttcatctattaaattgtatatatcatctaatttatccatttctgaaacatactcttttaggatttttgcatttgataaatttatagtatcttttaaattaggtaacttttctatcgaattttttaagtgaattaactcttttggtgttactctctcaaatgctatctttccacatattctttctatatcgtatatatttttaagtatatcatttaggtcttctcttaatataaagtcatcttttatttcttctattacatctaatctattttcaattttagatttatttatcaaaggttcttctacatattttcttaaaagtctacctcccattgctgtagaagttttatcaagtacatgtaataatgaaccttttttcttattccctcttatagtttgagtaagttctaaattagttctagtaaacatatctaaaaccatatattctgatgaattgtatatatttatattattaatgttagatgttatttgtttttgagtattgtatatataattcagaagaattgataagcttgactttattagacctttatcatcaaactttagtttttgtagataaacatctggaaaatattcttttaatatatttatatccaaatagttatcactaaaactttcatttatgtatatattacttacagtagctatatctctaagcttttctataaagtctaaatcatttataattatttcagttggatggatttttgcaatttcttcaattaccttatcttcatttaaacatgttgcattagtttctcctgtacttatatcaacataagttagacctatattagtaccatccttatacaaagataataaataattattctttttattttcaagtaaatttccatctaaaactgtaccaggagtgatgactcttataacctctcttctaacaattccttttgctgtagatgggtcttccatttgttcacctattgctactttatatccattttcaactaattttgatatatatgaattggctgagtggaaaggaacaccacacataggagcacgttcttctaaaccacaagcttttcctgtcaatgctatttcaagagcttttgaagctactaatgcatcttcaaaaaacatttcataaaaatctccaagtctaaaaaacagtatacagtctttatatctattttttacttcaagatactgtttcatcataggagttaatttattcatatctatttgcattatcaaacctccttcttttctaattaaatattatatcatagtagatgattattattaacacaatatataaaattttgacatataactaaaaacaatccaaaatgtatactcacattttggattgctaagtttaatgcttattaaataaaaatatatatatttttacaataaagatattatttcttttttaagtttaatgatattttcaaggttatcttcatttaactttctactatctataacaaattctttctttactattgatggtttttttgaaataacataaattctgtttgatagcattatagcttcgtcaatatcatgagttataagaagtattgttgaatttacttttttcttaacatctaaaagccatttttgcatggatgttttagttaatgaatcaagtgccccaaaaggctcatctaaaagcattatgtcattagaatttataaaagttctcaagaagttagctctctgtctcattcctccagaaagttctgaaggatatttatcttcatatccgcttaatccaaacacctcaaaataaggttttaccattgacctagctttactctttttttctttttttaaaattagtggtagtgacacattatctattatagttttatatggcaagagtaaatctttttgatacatataactatatttaccatttatattcactttgccactatcataatctgtaagtttagttataatattaaaaatagtactttttccacatccacttggccctaatatagaaacaaactcaccttcataaacatcaatacttatatcttttaaaacttcaatatctttataagtttttgatacattttctatagatacttttacttttttattgtggtaaaaattcatttgtgtaagcatcacttgccttcatatccttatctattaatttatattcttttaagaatgatgtatagttgttccatacactatctttcatttctccccatcgtggtgcatcatctttgtacttgcttgctaaatattcttgactctttaaagctagtttttcatctacttcaggtgcatgttttactaaaatttttgctgattcttctggattttttattgcatattcataaccttttgttgtagcttttaagaattttttagcaagctctggattatctttaagcacagtttcattagaaattataagtggtgtataataatccaatctctcatctaaatcttttactggtataaagtttaagtcatatccaattaaatcagctttaactgcatcccaaccttcaaatatccatgcaaaatctacagttttcatagctgcaaagaaatcatcttgaccagtattaactatctttaacttattaaaatcagctccatttttcttcataactgctttaaaaacagcttcttctgatggagagccccaaccaccataagtttttccttcaaaatctttagctgttgttatattcttttcttttggtgatgcaaacccagaagtattatgttgtataacagttgctacagcttttattggaagtggatcttcactagtctttgcataagtaacttgttcttgatagcttataccaaagtcagcttttcctgttgctactaaagtttctgctccactttcaggtggttgtactatttcaacatccaaaccttcttctttatagtaacccttatcaagtgctacaaataatccagtatgatttgtatttggtgtccaatcaagcaccatagttacttttttagaagaagtatctttatcattgtttttgtctttattgttatttgaagaacatccagttattgttgccaatgtaaaaacacttactaaacctaatattcctaactttttaaaattcataattgcctccctcaaatacctttaatcaattaatctatgtcttataacaactttttttacagcctgtacaattcctacaaacattaaactaaatataactactaatatagtagatgcaaatactttatcaagtgcatatgcactttttgacctaagcatataaacaccaagtcctttcgttccacctagccattctgcaacagttgctgccattacagcatacgttgcagatattttaagtccagaaaaaaatttatccattgccataggaaatttaaggtgaatgaatgtattaactttatttgagtccatagtcttaaataaatttaaataatctttatcaatattctcaatgccatctacaaaacttattaatataggaaaaaaacaagtaagcattaccatcaatacttttggcattgttccaaatccaaaccatatcataaaaagtggtgctataattattgtaggtatcatctgtgtaaccaacataataggataaagacatttttttattattgatacaaaatccatcaatattccaattaccaatgatattataattgcgactataaaaccaagtattgcttctcctatagtaaccacagcatgcatggataaattttgataatctttaaaaaacacattaattatatctactggtgtgggtagtatatactgaggaacttctaaaactcctaccatagattgccaaagaataagtataaacaaaaatgttgctattggatatatactatctttgactttatctatgatttctaagtttttcatctatagtcagacctccagctttttcatctactctagctactgttatgactctttcacatccaagattaaaagggattttatgtaccttttttaataattcaaaaacttcatcaaaatcaccttcaacagtagtgctcattgctcctatttcacatttaagaccacttttttcaatttcagcaatacaagcatctactactttatacatttcttcttcacctttgtaaggtcttagtggcattactgctatgtctgcgattaccatttaaatcactcctttaaaaataattaatacctactaggtatattttgttttttattaaaaaattttattactaaaaagatattatatttaaataaaagaaaagtcttatccaaaataggataagacttatttttatcttaactggtctccctacactggcattatccaaacaggttcaaagggtcgagataaaatctcctctcagcacattagctccccgaaatatattatatcttttctacttgattatactacacttatcatattttaacaaattttttatttatattagatattttatccgttcaaaaatatctaatatacattgtacattattacaccaaataaattatcttaaaatggtaatttatcaacatcttccaaaactagattaactgaattttctagtttttattttgctatttcaagcatatttggatgtatatcaattccatacaaatattgttctaaatttctgttttcactaatctaatttgcaatcgttacagattacagattagaaatagcttttagactctacttatctttatctacaaaaaatccttcaataaattcagtaataatattcagtaatctaaaaataaacctctatctggatttttaagatacaagccttttaggaagtatcttttgtgataatataaaaattactcgtcattatcatcaaaatcctcagcaaccaacattttagataagaatcaaactctataatataattattttatccaatttatttttgagaaataaaatatttttttaatttttaaattttttaatatgcaccttgaaaaaagaaacgttttcctatattatggtaatagtagaataaaactaaataggcaaaactagagaaatttagtgacgcaaagctatagggactaagacttatgaaatgagttatgtcagccagttgccaaagagatattttctttttgtttttatgaatgttttttagggggatatatgatatatgtttatggataaaatggatagatgtacacatatactaactgcatatatatgcagttcacgcgattactgcaattttatagatacacaattaaatgattttatactagaatatggagagaatgtggtagaatcttgtttgcatcaagtgatggtattggtaagcagatataattaaagaaattttattttctagaaaaccctttttagttttatctacgttttataattcattaaagaactaatcaaaataagcttcattatatatttttcatgaagtaaacagttgagtttatctcatatactgtttaccccaattacataattctaataatatagattccaatgatttaccacgtttagtagacaaatattcaacttttggaggaatagtcggataagaaattctcttaataagtccatctctttcaagatactttaattcttgtgacagtatcttatgacttatatgaacaacatctttttttaattgactgtaacgtattggctcttgttttaaaatatgccataaaataattgccctccatttacttcctatcacagtcatggtaaaaccaattgaacaattaaaatctttttgtctttcttcaatatttggaaattcttcaaaattattatctatatccatctcaatcctctctttcaaaatagtaagtatctaactaaaaagtgcattcttgtttagcgtactaattcgtaatataatcttgattaaaaaatagctacgcacactcgtgactttagtcatgagttagtagctaaaatagtcaacatatagggaaacctatatgtagagataggatagaacctatccaatactacttgaattgctaaaaacccctaaagctaaccaaactaaaacataaggatgaaataaacctaagtgtgaaagttacgaaagtagaaaaaattggttagatggtataaggttaaaccctaagtactttaaaatgggtaatcagcaggtaaactccgaataggagaaacttcaacgactattcctcttgagggaagtacactacaagttatcggtagtggaagtgggtagaccttaacggataatgccgaaggataagatatagtctgtgcttatgtgaaagtgtaagaagttcataagagaactgcataggtagtagcgaacttatgtgaacgacagcctcaaaaatgataaaagttaagacttacggttcttatatatgttatttaaaattaaatataaaaccttctaaataattgttttaaataattacatttgttaatattatgataggtgattaataaattgttcaccacagtattatataatatattaaatattaaaatcattaaaaagtgtatcaaaaaacaattaaagtgaggtgatagcagtgaaaaaagcttataagtttagaatatatccaaataaaaaacaacaagagttaattaacaaaacttttggatgttgtagatttgtatataataaatatcttgctaaaagaatagatgtttataaaaacgataaagaaacttttacttataaacagtgtagttctgatttgaccaatttaaaaaaagaattaaattggcttaaagaacctgataaattttcactacaaaacgccttaaaagatttagaaaacgcatataataaattctttaaagaaaaagcaggatttcctaaatttaaatcaaagaaaactaatagattttcatataaaactaactttacaaatggaaatatcgtgtattgtggtcaacatataaaactacctaaacttggtatggttaagataagggataaacaagtacctaaagggagaatacttaatgctactatatctaaagaaccaagtggtagatattatgtatcattatgctgtactgatgtagatattgaagtatttgaaaatactaataatcagataggtttagatttaggaattaaagaattttgtatctcaagttgtggagactttatagaaaatcctaagtatcttaagaagtcattaaacaaacttgctaaattacaaagcgaattatcgagaaaaacaatcggtagtttaaatagaaacaaagcaagattaaaagttgcaagacttcaagaacatatagctaatcaaagaaaggattttctacaaaaactatctactaaattaataaaagagaatgatattatttgcatagaagatttacaagtaaagaatatgattaaaaatcataaactatctcgctcaatttcagatgtatcatggtcagaatttattcgtcaattagagtacaaggctaattggtatggtagaaaaattgtaaaggtaggtaaattctttgcaagttcacaaatatgcaataaatgtgggtataaaaacgaggaagtgaaggacttaagtataagagaatggatttgtcctagttgtaatgaaactcacgatagagatataaatgcaagtataaatatattaaaagaaggattaagactaataacaattcaaaataaataacgtatgtaagaaccgtaggaactacggggatagcctgtggagaattagtaagacatattttagtatgcaaaattctatgaagcaggaaccctgtgactttagtcatgggaggttcagtgtagcatagagccttacataatactacttttttagatgtatatttttaaattttaatatagacatatgttattttattaattttatttaaacagataataataaataataatttatctcaagttttctatgtagataaactaatctaatgtttagaaaggattatataatatgaataaaaaatttcgtctttatcaagttgactcatttacaaaagaaagattcacaggtaatccagctggtgtaattacaaatgctgatggcttatctgaatcacaaatgcaaaaaataacaagagaattaaataattcataaactgcttttattttcaataaattggctaaaaatcatcaagaaaattatgatgtacatatcagattttttacaccaactaatgaagttcctatatgtggtcatgctactattgctgcccattatgttagagcagtagaaaaccaattcaataacaaaacagtatttcaaaaaactggtgctggaatattaccagttgatattataaaaaaagataatgattatgaaataattatgacacaaggaaaaattgaagtatctccaccattacaacaaacctatcaaaaaagattacttaatgcatttggtattttaaatgaagatattcgtacagattgtcctattgccatatcatctacaggacattcaaaagttatgattggaataaaggaattatcaacattaaatagtttatctccaaatttatatgaattatcgaaaataagtcaagaaataaaatgtaatggatattatatttttacattacataataaagaaactctacaagttcatggaagaatgtttgctcctgcaattggtatttcagaagaccctgttacaggaaatgctaatggacctttaggtgcgtaccttgtacattataaagtaatacctatacccaacacagagtttatatttgaagcagttcaaggagaagcaataaaacgcaaaggcaagatgttagtaaaagtaattatttcagataataagccagttgaagtaaaaataattggaaaagctgtaattgcattctcaacaaacatagaaatcgaattatagattctttctaagtaaatttttgaactttttaatactaatttaataacaaactaatttatatacaatcaaattaatttttttattatttgttaatatatatttatcattatattatataataatatagatagttactatatcttataattagataaatcataattatatattattgttaaaactcaattatataatttttaataatattattttaggaggtaaaaatgataaacgatattaaaaataaattcaaaaattacaaaccatatataaatggatacaagaatatgaagagagcatctgttttaattccaataatagaaataaataacacacactatatattatttgaagttcgctcaaaaaatttgaagcatcaacctagcgaaatttcttttccaggtggtaaaatagaatcaggtgagactccatatgaagctgttattagagaaacttgtgaggaacttggaacttttagtgacaatatagaagtaatatcaagtcttgacctccttataacaccagtaaagtttatcatacatccatacttaggatatataaaaaatattaataatttaaatataaacaaggatgaagttgaccatacttttttggttcctataaaatatcttttagagaatcctccaaatacttatagtaatactgtaaaagtttttccagatgaaaatctaccatatggttcaattccaaaccaaaaagattataaatttgaaagtggaagttatcctattctgttttataaatataaagattatgtaatttggggaatgacagcaaaaatactagaaaactttttaaattttttatcagaataacactcataataaatcatcaaaacttttacataagaaatttataaaagtttctaaatttaacaattctaaaatatcaataactatattttgtagcacttttttattttattattgtttgaatatttgatggttttcaatgcaatttcaacataaatactatgtattagtgtatactgttgatgaattaaagtatgataatctatttaataaagtatgaagtaaatgattttaatgtgtctttatggtaaaattactaataagtaataaaattaattaaaatatatggaggtgcttataatgtttgctgtaggatttgttgttataattgcacttgcctttttcattttaagtgtactattatttaatggaaaagccagtatgctactagcaggttataactctatgagtaagaaagaaaaagcacgatacgataaaaaaaaattatgtagaagttctagcattgttacttttattgtctctataatgctatttattatggcatttttgggatatagaatagagagtggtcaaatggacgaaaaaaaaatggttcccttttctataatatttataatagtcatactttccagtgtattttttaatatcctctactctaacaaaaaatgtaaaaaataaatagttgtaagttgagcagttaattataaaagattgactgctttttcatgtatattgactactcttattaaatattttaacatttaaaaatctatgtaaaaataatgaatatagtacaaacttctaataatgattttacctttgtggttacagtccactatatataatttaatatgataacatggaattactaatgacaactaagtaagcttttataaaatataataaaacaaaaatagatgtacaatgaaattatatcttatatcaaatttatttttattaatagcaaaaacttacattagcataacatatgacaaattcgcttaaaataaaaatttttaatataatttgttctatagtacatctatttcgattagtttacataattttattattttgtacaatattaattatttactaatatcccatttaatgaaaaagttctaggttcagtaattttgaccataactaatttaccaattaaatcatcatttccaccttcgaaatttacgagtttattttgtctagttctaccagcaaacttattttcattatttttacttcttccttcaactagaacttcaactattctatctttatatccatcatttatttctgcagaaatcctatttacagcttctaacaccctattaaatctatcatgctttatatcttctggtatttgattttccattttagcagcaggagttccctgtcttttagaataaataaatgtaaaagctgaatcatatctaactttttcaaccacatctaaagtgtccaataaatcttcttctgtttctcctgggaaaccaatcattaagtctgtagaaaaagcaatacctggaacttcctttttagctttttctattatttctaaataatattcctttgtataatgtctattcatttttttcaaaaggctactgcttccacattgtattggtagatgtaaaaactcacacaccttatcacaatctctaattgcgtatattacttcatcagatatatcttttggatgagatgtcataaatcgaaccctttcaattccttctatatcattcacttttcttaaaagttctgagaatgaaactggattttcaagtgtcttaccataagaatctacattttgtccaagtaaagtgatttctttcgttccatttgcaacaagctcttttatctcgttaattatatcttcaggagttctacttctttctcttcctcttgtgtatgggactatacaatatgtgcagaaattattgcatccatacattatatttacaaatgcttttaattcaaattttctattacttctaagaccttctattacttctccatccacatcccatacatccactaacattttgtcagaatttattgattctgtaagtaattgcggaaatttatatagattatgtgttccaaatataaggtctacatgtttatatttttttcttaattcctctacaacatgtggttgttgcatcatacatccacatacagctattttcatatctggattttttccttttagatgttttaattgtcctaagttaccatacacttttagctctgcattttctctaactgcacaggtgttatatattattaaatcactttcttcaaccatcattgacatttggtatcccatctcttctaacatcgaacataatttttctgaatcatgttcattcatttgacacccaaaggtttgagtaaacacgagttttctctttccagttctgttgaagtattcttcattttgtctgtgtatttgttctatatatttatcttgttcttgtattttctctataggtattgttacttgttttcttttgctcacgtctattcctcctagttaatttcttatattacacataaccttaattatatcaaataagaaaaatcttttaaagatattattatttttctagttgtgttttaatagtaaatctaatgatttatatatactatatttctaaaatataaaatcatataattattataataataaaaagatgttttaaattaaaacttaaaacatctttccttaaataaaatatatgatttactattaaatacaattacatctattcattttcaattaaataacaatcatttaatattaaatattgaccttcctcaaccgttatatatcttcttcctgaaaaagtatcattagtaactattccctctgcattacctaagctatcatttctaacttcataatatgcatcagaagaatttgacattataatatattctccagcaggaatttctaatccaattttatacataccatttccaaacttaccattcttggccttctgggctttagcatactttgctaatgtcattgttgaatcctcaattttaatatattgaccattctttaaggtgatatatctagtcccactaaaaatatcatttgaaagtatactatcagcattacctgtactatcacttgtaacttcataataagaagcataacttcctgagtttgaagtaattaagtattcacctgctgatatatcttttccaaccttatacattccatcttttatagtctttgtagtaggtttaacattttttacaaccccagtattaatatctccaattccatttgttatatttaaacactgttgtactatatttgaatctatatatcctatagaagttatcttcttagcattttttaaaatgcttttattgctaccatcattaactaaaactattggaccatgttttgataaagaagatcctacaagtgcatttgttaattcataagctccagctatataaaactctctagcatccttataaaacttatttattattgctttattagtttcaaaacgagtactccctcctagtctagtagatttagtattgtttactaaagtggtactcattgaagctgttcctcctattacataagactttaaaccactagttgaaaaaggtatactttgtccattagtaagaattattggtgctttatctcttgctgctacagatgcaatacttatagcatctgcttctcctttatatgcattggttagcataacagtattgactttttttattgaatttatttcttttgcaacattataacttgtttttattctgtcatttcccttaattcttacaactttcattttcttagattttaatgaattttcgacagatgtactaatagaatatgttcctccaattatataaacttttgatacattttttaatcttgcagatgtctcagttggtatagtatttttttcagttaatagtataggggcatttaaagctcctgctagtccacttgcacttaatccatctgcaatagagttactagtattaattaatatagcagttttatatgcatttttatctgctattttgcctgctatttcatacttattttttccttgtattttttctacagatgatattgcatctactaattgaatatttgcaaatacaaaagaaatacttaaagtcaatgttaatattcttttatagaatttcataataaaattgtccccctcataataaatttttaatatataaatacatattcttaaattagttatgtacttaacaaacttatgtaaaattgcaaattatattaagcatattacaaataaatattaatacaattattcatttagctataattgtatttacatttatattaaaaatcaactagatttgtataaatacttataattatatttttattcttaatattttttttattatgttattttaatagatttatttttcttttttaagcatagagatgtatttttccatatattctatttctattatagtttcgcttatttaattcacccaaaatttcacttaatattagaattttaaatcttttactaaaacagacttttatagttctattaaaattttttactaaactttattttatactatgaattatctattttttttgctaaatttaagcaagttttccacaaaaaatatatacattactatatttttaaaactctataaatatataattgatttaattggaaattttagtgtattcaaaaaatgagaaatcagaggagattaatataaaaatttatcttgaaaagtcaattaaatatatcttatatttaataactacaaatgagatacatataagaatattatataggtatgataatttatctgttaaattaagtgtaattggtactatataaatattttattaaaaataaatatataataccaaatctttaaacaacataagaataaaatagttataatctactttattcttatgttatttagttattataatgctttataaagtaaaatattatttcgtagttaagcttgataactaactcttcttattgatagactaacaatcttgaataaaaatattcctgcaactagatttattaaaacagctggtaatactactgctaagaataaagctgtaaatgaagctcctggaagaccaactatagcttgagctgctaataaaaagatagttccacttacaagagttcctattggcattattattgcaactactacagtatcttgtgttttcttagctaatttttttataaaaggcatattataactaatattcattaataaaaatactatatttgctgtaagagttttatctattacattaggaatttgacctcccggaaaacttgatgtaagtgctgtaaatattcctgttactatacccgctatcaaacaagttttataatcatctctatttaaaaccaatattacaaataacattgctagtggtacatctggcttcattggtaatcctatagctggtgtgatttgatgtattaataatcccatcgctaaaagtattgcatttaaagttaatttttttgtatttgttttcattttttgtacttcctcctatttttttaattttcaatttatttttttgccaacctactatatcatcatctttagcttttgaaattcataacatctttctcaccaccttctatcttttaaattttcagtaaaataaaaaactccgtcctaaactaataggacggagattatccgcgttgccacctaaattatataaaaattaatataaaattcaattttcatacatctcattatcaggtacttacataccttattcgctataacgtgcgactgacgataaagtctactctcaaaactatgatttcaatttattcctctaagggccattcatcaaattttttcttgctaagattccaccatcctcagctctctatactgaacctaaatttaactactcttccttgtcataggatttaatttattgtattgaattttgttgttaaaataatgatattcttttttctaaaaaatgtcaatacctttttataaaaaatatattttgtaatctattttttataaaaaaagtaaattatactatacatttcttttcatatacaaaattctatgaataattactttaatggtctaatagtctgctctttggctctaattcttcttatattaattttgtgaataactgttgatgtaattttatattttgattcatgaggaattaaattcttcaaagttaattaagtacatttatcaataaatttacttaattaaccatcatttaatactcattcctgtatttatatgcctcctttgaaacagaatattactccattttaattacatcatattattaaatagataccaatgattagaaaaatgatattcttttaattatttttagtaaaattttttcttctttcttttaataaatattagcactactaaaactataaccaaaaatatgactattatggacaatactaattttgttaggatattatgtcttcttgcatttcgtcttttatatttatttatagtttgatatccatactttttagttcttatacttcgttttttcaactttactttacttttattatatttcctacttttatgtctacttttagatttaatagttttaaatttagtattatcatatgtataattctcttttattgaagaaatgtatacactagactcaataatagcttctgcttctacttgtaatggatttataatactgattataagtagaaaagatatagctatcccaatcaattttttcttcttattcatattttccccctcataaaaatttttaactagttcattataatatatatataactaaaaattacaaattttttcaagtttcttatatatcttattatctttaatattatttttattatcataacttttactttttttaaaatttttcaaagtagtattaatttatgatacttggtgtataaagtataagttaaatctactttcaattaaatttaccatttataattactttataataaaaataaattagttaatttattctctttagttctgttataatgtttctacaaaaaagaatcccattaatgggattcttttttgtgatttattaacatatttaaagctcactagtatcgtattataaacttaaatgctcttctatgtattgattatatacatatccagaatatcgtttttcatttttattgatattaactcttgcccattttccaacgctataacatacttcaactttaaaaccatcagggattgtagttataactttagattctaatgttctatcatttctaagttctaaacttaatccatttgttcttatatttcctatgtaattcttttttctattttttattgtatcattactattgtttttagcattacttaatctttctaaatatttataaagtaaccagcctttgtcataattactctcaacttctgcccatattccatctacacattttaacttaacaattttaccttctggtatactttttaatttcaaactatttatgtctggtttttctcttaaattcaatttaattttagttttaaaattgatgctagatttgccaaaattttttaacattaattcagatatcatcttaagccctcctcttgccaaatattaagttattaaaatatataactctaaaaatacttttaacaaaaagaattattatctttttggcaactggctgacatgacctttattacataaagattttagtccctatagttttgcgtcattagatttatctaatattgcctatatctgaataataacataatttgaacaattaaaaaataatattacctcaaattttatattatttaaatataaattaaatttttaattaataataatcaaaaaatatctttatatttattcaattactgttctttatagtcaatataaaagacagtaatttatctatagtgttacttatattttatatatatggctatttttcaacattttacaatatatataacatttatttttttaacttttgtcagtaaaatgtcagcaagacactttatccacaatttttatataagttttccacaacttatccccagtattatccacataaaaaaggtagctcttatattattagctaccttttatttattaatcttcatatttccagctttttatccaacttcctatttctattattttttcttcagttatttcttctccatcatgtaattttgaaattaattctgataaaggattgttatgtaaacctctaaaaactctttttccctctattttgagatattctctctcttttattaatactgtatagtgtacatgcctcccaattctctatgatattaaaaaaccttttttggttaatctagctaaaagtataattgtagttgtatgcttccaaccatatgttttttctatttcatctgcaacatcttttgatattacagttttataaccagtattccatatgcatttcataatttttaattctgtatctggtaattttttatttagcataatatattccttctttcaatttatgtcacttcttcaaatttatctagcttaaattataataggagttttttagaacaaaaactatagttaatttttaccaggtactctacgtgtttagtctgttttttaagtgtaaaataatgttcatatctataaatttatttaactttcaaacaatcctgttgaataataactaattctattgtattattttagttgtagaataaaactaaatcggcaaaactagagaaatttagtgacgcaaagctatagggactaagacttatataaatatcttatgagttatgtcagccagttgccaaagagatagtgttctttttgtttttatgaaagttttttagggggataataatttatatgtttggaaataaaatggataaatgtacacatgtattgactgcttatattagcggttcgtatgattattgtaattttttagatacacaattagatgattttatattagagtacggagaaagtgtagtagagtcttgtttgcaccaagtgatggtattggtaagtaagtataattagatagacattgatttctagagaaccctttttagttttatctacatttatattaatatatagcaatgtaaaacgcttaaatatatttttaatattaagaataactaaaatgttgactaaaaaatataattaagtagacatttctattaatctatgatacaatagtatttgtggtaatacacaattaaatcaagtatatcttgatataggttaataggagtatttttaatgaataatggaatagtgaaatggtttaataatgaaaaaggattcggttttatatcaatggaaggtagagatgatgtgtttgctcatttctcagctatacaaacttcaggatttaaatcattagaagaaggtcaacaagtaagctttgatatagttaaaggtgctagaggtcctcaagcagaaaatataactatattataatatatagatttttcgggaaagactctttttagagtctttttttattgttagtatatgtaagataatcattggtgaagtaaataaggtatattgagtaatgttcttgatagtttatatgctaatgaatttcaaaaaaataagcactcctataaaaagagtgctcttaatgtaaatataagccttcattggtccagcctaataccccgtattctccaagttctaactcttttttatatacattaccactttcagccatatctaacacaatcatttcttctttagaatcaatttgtaaaatatgaggactgtgtgttgtgacaattatttgtgtttttaggagaattgcttttaatgtaataaaaagtttacatacaacatagttaatataaaacaaaattatttttgagaatgagctaaataaaatcttaactttacataccacatagttgatataaaaccccaaaataaacttagcatctccaatgtttacacatatacaatgctcttaaaattgcagtgaacatgcaatagtgcaattgataatacttatcatatattctcaataccttatatttcaactgctaaacctcaatttgtcacaaatatcgctcactgcaaaatttctatatttttattatatcatagcatataattaatattttcaattaatttttacatttaattatgtttaaattctataataatgcaactttaatgtttctttctggaactaatataaaaactatttcagaaagattaggtcatgcagatataaaaataactatgaatagctactctcagtttttagaagagatggacagagaagcatttgaaaatttgagcaaaatactatttattgtattttaaagaagatgacttattcaatatttgatgctagaatataattaataaaaatttaattataggtgattgtattatgaacattattaaaagcataactttactcttaacattattaattgtgatattaatgacaggatgttccccaagagaaagtgctagtgaagttgcaaaaaaatatattgataagatgaactctggtgactatgaaacagcatatagtttattaagtaaagatagtaaaaaaaaaattagtatagaaaatcttgaagaatttcaaaatattttagttagtacaaaaagaataattagttataaaataggtaaagaaaaaatcataaaaaaatataaacatgatggaaaagaatataaaaatgttgttaaattagaagaaacttttaatataaaaaaccttctttataaaaaagatgattctctaaaagtaaatagatattttgtagttgaaaataacaaatacaagctattattgtatgaaagtttcaaaaaagaatttggtattaatagtatggaccttgctcaacttaagcttaatgattttggactaaaatactttaaagaagttgaccttatactaaaaaaagctattgctattaatcctactgattcaaagctttattatgcccaagcatgtaattatatgaattttgatggatttcctggttattcagatacaacatataatgctttagattcaattaataattctttaaagtatttagataaaaatgattctgactacaaaaaaaatgcaagtaatatatataacttaaaaggagttattcttatgtttcacaaaagatttgatgaagcacaacaatatttaaataaagccttatactttaacaaagataatgaagacccaaaatataatctaaatacaataaaaaaacatctaaactagatatttaatttttgaatttataaaatatttttttatgtataattcagcactgaatcataatctctactaaactaattacaagtttaaattataaagacttatttctatataaatattactctataacaataagtttcttatttaaattttaaaatattatctaaaaatcataaaaaagaaggtataaagagctaccctcaagctcaatataccttataaatatctaaacttcattttttactaatttttctatatctttgataatatgttctttagatttttttccagctatggcatcaaaaattgcaacagcctttttctctccaaacttttctgctacatcattaaagtctaaaaatctaacactttcttttggtttaccaaacatataacacctctcatacatttttatatatttattataacttctatagacttatttttcaccaataaacgttagacaaattagtccctttatttttttaaactagctttaccttcaaaattcttaacaaaaacagtttattctactctataaataaaaatagacaatttaatttgtaggaaactgataatagaatacagtaaataaaactttgtttaatctatctgaaaaagttatctattaaaactgctatgaatttataaagaatattctagttcataaaaatacaaatatgtaaatataatcaccttaatattcaatttatttaaaataaaaaatgtataaaagatttaataatgacaatatactattctcaatacaatctatgatgtaaataatttaaaactactatattatttaaaaatttatatttatatatgcaattctaaaaacttaataagaagtgaacttagaaaataaagcttaatttcaaagacttaaatagaatattattattagtctaaataaactacgtgtatcaaaattatatattaaattcttctaaaatttttattgcaaatcttgcgtttggatatgtaatagacccgccaccaattacacctatttttatagcttctataatttcatctttacttgctccagaattaatacaaccctcaatatgataacaaatacactcatcacatcggcttaaaattgaaatagctagtcccattaattccttattttttttacttatagccccttctgaataagtcttatcatcaagacttccaaatactctaaaaaactcatctgtttcacttaattttttattgtaaaatcccctatattctttcatttctctagtattcatcttctacctcctatgtttttcttataagagtatcacactgtacttatattttcaatattaaatacaaattttcattttatgttcattagcctaatttatattattttttgaaatctcaataagttatcatataagtaagattttttcagaactaaaatagaaatcttagtaatttctttattatctatctcagttctgaaatatattattcttatccaaacattattatagtgattaattatattagttatttttacctgaaattttatacatcaaataagaatatataaatggtagtattacaattacaaagattacaaagatattataaaaaggaatattaataaatgcattaataattaataatattccaccaataagccaaatccatccagctaaatggtgtgtcttattccaattatcttcatcatcaagagtccatggcaaaattattcctactgagtaattttgtttacatttaggaagatagtttccaaataaaataactattattcctaaaattaatcctgtataaaaattagactccaaactaactcctgttgaatataaaaccatcagtatttgtagaattactgaaagtatagcaactccccattttgataaattttgtataacatttgaaaaattagcttttttaggctcattctcaagtctaaaccatgtatacaaatggatacatagcattaacaatggtacaccaaaagctgctataacctttggagcataattatctggatttccataattatcaaaatgaattgcaacttcatttggtaatctattataaaaatatattgatacaataaatggtataaaacatattaaagtagataaaataaattgtttatttatcgcttttttcattatctttttctcccttctccataaattgtgaaaaccaaagcataacctcttcgaaaactgaaatatttatttcgtagaaaataaagttcttatactttgtttcaaatatgagtcctgccttttttagttgagatagatgataagaaattgtagcattcgtcatattaaatttttcactaatttctcctgctgacattttattctccctcaacataaccaatatttctcttcttatagggtctgaaagagctttgaatgtttctggaaaccccaacaccatcacctcgctatttagaatttcatctaaatagaatataacataacatccattttatttcaataactatttagaaaaatttctaaatagttatttccaaatatttattgaaaattttcatattaagattctcaatttacttaagtcgcttttatataatcttattttatctaatttttttaatttaacaaaagtgtattgcaccacaattgttaaagcaaaaacctaatgactgatatacttatatatattacatatacttttaatttcaaattaaaagtagctaaatccaatttaaaaagtagttaagtcctatttaaatagaaaagaatgaaataagaaatatactgtataaaaatgcataaaaacctctactaattagatacaactataatagaatatatttattattataataacaaaagaattaaaaaaattaatttagcataaccttgttaaatatagatttgaatatgaatttaaagttatgtaaaattaaaaatacaggaatgaaaattccattcctgtataaaatctaacttttgagtctcaatacaatcttattttgagacaatcttttttgttttatattttcttatatttaaaatataacgcatatcttatgcaacatattcatatttttctttatattctttcatcgcatcattccaagcgtcttgtactgttacacctcttttattagcaattttttgtgccagttcaattatcttcatagctcttcttgatatgttcataaacattcctcctacaaattaccatatatttcatatatataaatcaaggttatatttttatgatatataatccttctattgtaatattacaatttatatgtgtattatatatgaactatattagaagataattagaatttttataaagctatatgattagattaaatataaaagctttacaattacttataaatttaaaaagtctataaactaaactaatgtttgatataccaattttacgaccataaataatgccattactaaaaatattggttttatcatctttgaacctttctttatagcaactttagcacctacataagctcccattatcatcactaatgcaaacactatagcaattttataatctacttgaccatttatcatgaataataacaatgaagttatattacttgttaagtttaatatttttgtatttgcagaagcatgtaaaaaatcatatccatatatttttataaatccaaaagtcaaaaaagttcctgtacctggaccaaaaaaaccatcataaaaacccattataagagccataagcatccctagtcttaaatttttcttattaacagcttcaaaattatcttcttgacctaaatttttagaaataaaggtgtaaatagccactattaaaatcataaccacaaccaaaacatttaatatctcttcacttattgataatacacatctcacacctagaacactaccaataatagtaaatggtactaatttttttaaaagatcgttattaatttttccagactttgcatatctataggcactacttatacatcctgctgatgctgcaaatttatttgtaccaatggcaagatgtactggcactccaattgccataagaacaggcatgcttataagtccctcctcctcctgctatagaatctacaaaagcagctaaaaacccccctatacataaaaaaataactgaaaacataaaattcctccatcattctctttcaatttttcttacaatatatattatataatcttatttaatacttattatccagcatattctttctatattcatttggagttatactattaaacttcttaaatatttgtgaaaaataactactgttattaaaacctactttcttacaaatatcactaatactcatgcttctatctaacagatattttttagattcttctatcctaagaagatttatatactcagttattgaaactttatttctttcattaaaaatagaactcaaataatttggacttataaaaaaaacatctgatatactattcaaatttatattttctttataatatttttttatatattcgtttatattttcaattagatttcctttatcttttctccaaaatgctctattcttatcaatacactctttggaaaattcaaataatacattccataaatcttcatcactgtctacaagtgatatttttttattatatttatttcttaaataagatataagttttaaatcctctaaatctctaagcactgttctagacaatacaaatatcatttcctgaatagtatctctaacatcattatatcttaatttgtttgtatctattagattataaacaccttctaaattcatatttttaatttctttttcaatataaagttctaattcaaagggatattcttttgaagaattattgaacatatctatcggattaataatatactcttcttctaataatctactatttgcttttttaagtgcctcttcaagtcttatattttcttttctactctttaatatctcctcatcttttatactaagttgattttcaaaaaaattcctcttagctatttcctgaataaattcagacatcattaataaattttcttttaatacatataatctacttttaggatttaatggaaattcattgtaaattttgtttatgtattttatatcaataccagaactacttgataattcagataaatttttatctatatcaatagacttatatactataaaattaccacattctatatatccaactatattttcttctaatactataggtatctctaaactggaaacaccatactcacaatggtacactttttcaaagttatcattatttatgcttttaacaagttttttagtacacggttttatatttttacaaatatcgcaaaatttattttctttcttagtctcaaatattcctttatactttaagtcatatacagatattctaagcttcaatatattagatatttgatttgcaagattttcaattatgtttacattaactaactcttgtatattgttttcagaaaatactataggtatttgtctcaaactcgaaaatttatgaggaacataagtaattaatattactaaatcaattttaccagtgtttataatttcatgttctgaatatggtgggcaataaactatagatgtttcctttatattgacctttttaccatcaatcatttgtattccttctccctgaatcacatataaaagctgttcttcacttaaatgaaaatgcttttcttggcagtttcccggaaaaaatcttacaattccagcactaagtctattgaattgtgtttttgatggttcgtgtatccacataacctctccccaatcaaatttttgtacttcattatttgactcaataaaatccaccataaactcacctcgtagtttttatctaaatatttttttattcctttaaatatctccttataatatacattatcataattttcttttttattgtatagataaatagttatatagaacattgtccaattcttcctaaaaatatagtgtaaaaaatctttcctcaaatgtttccaattgaatttactctttatattagaaaaatcaaaaaattatttctttattctataaggattattttttacacatctttttttcttttaagtaatatattttctcatctattttatccatacaactttctagttcatgtattttatttttaatgttttgcttatgttgttgaaataattggattcttttatctattgtaccatctcccatatcacaaaaatgaaagcattcatggatatctttaatagataaaccagtattttttaattctttgataaatattagacgctctacatcttcttcagagaaatagcgaacaccacttggttttctattgataggaagtaataaacctttttcttcataaaatcgaatagcagatgaagaaatttttgttatttttgatacatcagttatagaatatttcataatctctacctccctaaattttatatgaataagaatattataaaaataccttatacagtagtcaacaaaaaagtattgacttcaagttaggttgaagttgtactctttgaagtgtaaaagaaaacttacaaaagaaaggatgatataaatggaaaaatatgcaactatgattaaagaaaagctaaatgaaggaaaggtcttatgtggagtagctgtttcactgtctgattcagttgtaagtgagttaatcggtatatctggatatgattttatttggattgaaggagaacatagtgctttagaccgtaaagacattcagcaacatatgatagctgcccatgctggtggtgctgcttctttggtacgattagtaaacagtgaccctgaccttgttaagcccataatggatatgggaacagatattatttgtttcccatttattaatacagtagaagatgcacaaaaagccgtagcagcttgtacttatcctccaaacggtataagaggatataatcctcaaagagcctcttattatgggaatatgaattattttgactatgtcaaaaacgcaaacaatgaaacattaaaaatgatgttaattgaacagaaagcaggttatgataatcttgaagaaatagtaaaagtcgagggtattgatattatagcattaggccctggtgacttatctttagacatgggtttttccggatatatgaatagaattgaaataaaagatatgatttctcatgctgctgaaatatgcaaaaaatataagatgccctttattatttttcctacaatagaaaagaaaagtattgaagaatgggttaatattggagcaaatatgctttgttttgcacaagatactacctttatcacttatgttatcaatcaattattatctttttataatgagattgtaccaattcaaaaacaacattaaattataaatctaattttatattaaaagagactaatattttatctatctctattaaggatattttcttatgtatcataatattagtctctcttattattatatactgctatcatcattagttgctatttatactatttttataatatacaaatttattcagctaacgttttgcctaattctatacactcatcttttgcttcttcatttgggtcttccattgctgtaattccttctccaccaataattgtagcaccagcattttgcatacgttcttcccagtctctcatccattcacaatttccccatccatatgaaccaaataatccaatctgtttacctgataccatagattctaattctgaaacaaatggctccatatacccctcttctagttgctctgctcccatagatgggcaacctaatgcaaatttatcttcttcttttaaatcacttggtttcagtaagctcacatctaaaacttctggtgtcttaccttttaacttcacaccttcagccacaaaatttgccattttttcagtatttcctgttccactccaataaacaatatatattttactcatttttacctcctgtagtattttttaattaatcaatagttagttatagctaactaacatctaaaaaacaaaagatttctttatctgaaatctctttatttttctaaatatagaatatcacaattgattttgaaattcaatatttattgataatatttatcatttatattttatattcattttataatatcaaaacactgtatcgtatttctaatctttcatagaaaaatttctaacttatagtacttttgcatctcttataaatcttttatatgtataagtacatagaaaaacacaccttttccagatgtgctatctataatatcgtatatttatttttcaattctaactagctaatatgtttataaattttatcacttaatacctttatacattgatgtaaaatcttacacctaagtaatttttattatttgtctcgactctatataatatagctattttatcatcaaatcaaaaattatcttttgctattattcttgtatttataaagatttaaatataagtatccatttccttgttccgttctaggtattccaagcgctctcgtacattttattaattgtgcatacagttcagcttcatctaaatctctttcaaactcctctcttgcccattctttaattagtgctaatgagcctgatacgtatggtgcactcatactagtaccactcataatagcaagtttattatccatataagtcgatataatatttcttcctggagccaccaaatctattgtagtatttgaattactaaacttttcaaccaaatagttttcatttattgcacctacttctattacctcagcataactggctggataactatactcacttgtactagaatcaccatctccattattacctgctgcacacactacagaaatattattttttactgcttgcatgacagcattttttaaattcttatcatctttgtttcccccaagagacatagatataatatcaaccttgttatttacagcaaagttaatagcattaattatactttgatatgttccggtaccatctttatttaatgcttttgctattaataatttacaatctggagctactcccataacttcattattatagttagatgcagctataatacccgccacatgagttccatggccattaaaatcctcatatatatttttatttccattactgtcatcactaaaatttgcaccaccaattatttttccttttaaaagaggatgagatatatcacaacctgtatctattataccaactacaatatttttaccagtataaccttcatcccacattcccctagcattcatttgttttattccatatgggaatttattttttgcacctcttagattttcatttatttcatacggaattagtttcattcttttattcatcatatatcctcctaaaaattttattgcttataaaaatcatgaattttattttataataggtttataaatcaaattaaaacctatatctacttatttatatttatgatatattttttatttttaggagtcatatttttttgtatataaaataatatttagataactatattaaaaaatacatgtttgcttatatacaaaacttactaaaatatctttaatatttttgtatacaaacagtatatttttcatacaaaataaaaaggatacctcattagtgctataacacctaagatatccaattaatattttcttaattttttctaattttcgtaaatatagttcactattttaaaactgctcctgtatttgctgatgttaccaatttagcatatctacttaagtatccatgctttattttcggttctaaaggtttaaattttaattttctattttctatttcaacttcatctacttttaactctaattttttgtctggtatgtttatagaaattatatctccttcttcaactagtccgattaaaccaccttccatagcttctggagaaatatggcctatagatgctcctctagttgctcctgaaaaacgaccatcagtaagaagtgctacatgcttatcaagtcccattcctgcaactgctgatgtaggagatagcatttctttcattcctggaccaccctttggaccttcatatcttataactataacatcacctttgtttatttttttaccaaaaatagcatttacagcttcttcttctgaattaaaaactcttgctggtccttcatgaactaacatttcttctgcaactgctgacttttttacaacagctccatttagagcaagatttcctttcaatattgcaagcccaccttggttactatatggattctttaatgtatgtattacttcttcattttctatttcacaatttcttatattttcccctatagtcttgcctgttacggttttgcaatctaaatttattccatttatctttgaaagttcgttcattatagctggtattcctcctgccatatgtaaatcttcaatatgatgttttccacttggacttaattttgttaaacaaggagttttttcacttatttcatcaaaaaaatctaagttaaactctattcctgattcataagctattgcaggtaagtgaagtactgtatttgtagaaccagccattgccatatcaacagctatagcatttttaaaagcatctattgttaaaatatctctaggttttatgtcgttcttaagtaactccataacatacatacctgcatattttgctattctttttctttctccagaatgtgacgcagcagtaccattatatggtatacccatgcctaaagcttctgttaaacaattcatgctatttgctgtgaaaagtccagagcatgaaccacatccaggacaagagttcatggctaactcttctaattcttcttcacttactgttccatctttacatgctccaacaccctccattgcagagttaaaatcatatacttttccattttttttacctggaagcataggccctccactcacaacaatacttggtatattaagtcttgcagcagccattaacatacctggcactatcttgtcacaattaggtataagtaccaaagcatcaaaaccatgtgccatagccatagcttctattgaatctgctattaattctcttgaagccagggaataattcattccgacatgccccatagctataccatcacatacccctatagcaggaaattctaatggcaaaccaccactcattcttactccattttttgcagcttctgctatttcatcaagatgcagatgaccaggaatcacctcattttgtgcatttactatacctattaatggtctttcaatttcttctttagtaagacccattccatacattaacgctctctttggagctccttctattcctttttttatatcacttctcataatattacctctttcttacttttttaaattttcataatattattataatatatttttctattaattaattacgaaaattgtaaaaaaatattagcatatactaatgaaaatttattacgattttttatcaatatcttacacaatcgtattatataatattatcttttcaatatattttataaactaatatattttacaaattgttgagtaatattttatgatataaatcagaagaagcacttctataatagaaagtgctcaactatgaataagattaataatatatttgccttagatatatagacttttataaatattaaagattaatcaaatctgatgtttgaaactttatcccaattaatcttccttgaatagtcttctggatgtgataatctaactatatgagttgaattatcatagctgtaataaattgtagtagtaccatcaactggattctttttgtatccttgatatacagcactatttggtactttcttttcaacaaagctatatgcagatgaagtatcaatagtttctattttattaggaaatataaacatataaaaagctactactataaaaatacatatgcatgtaatactataccatttaatccatttcataaaattcctcctactttaccaaaatatactattattatttccatatatttataatatttatacatacgataaaatttttatatacctaactatataattgtagaaactttgattatatatattttttaatcttaataatatatttttataaattaataaatttttaagattttattaaaagatttttaaaacttacagtttaatataaagatagtacttataaaactaaaaacataaatttgaaaggggacaaaataaaatgatatggacattttattcatttatttgcgttatattaccatgcttaatataccaaatagtcgttataaaacgaaaaaatttgaaagttgaaaagaatgtaatgatacatttagtatgggtatatatttttttattatatatctatctagcacttagtaaagctggaattggtagcatatgggatataggaaggtatagtgggctttttagaattgatgaaataaatctaataccttttgactcagttggcatcttaacatatattttaaatataattatgtttatgcctttaggatttttactacctttaatttggaaaaattttagaaatattatcaatgtttcattaactggattaggtttttcattagcaattgaactttgtcaattgtttaacttaagagctacagatattgatgatttaatgatgaacacattaggtgctgttttaggatattttatatgggtaggtgtaaataatttatttaatcttataaagaaaaaagatattttcccatctatatataaaaatattattcaagatgaaattgctattacaattgatgatgacataagcaaaaaaattacctctctttacaaaaatgaagctattatatatttaatacttgctgttttaggagaatttttattgtttaattggtccattataccttattaaataatttattgataaaacaagtgtacttcgatatttacaaatatgtaaagccctctttcatactacaaaagaaagtgggctttagttattaaactaaaatgcacactcactatttagctggcatctgaaatattttattaacattgtatctgactttatttgatgttatataatcatattttgttccattttcaatgaagttttgtatattgtccaacacttgtatagctcttgtattattttcataatctcctatttttacagtatcaattttactttcaaatactgcataaacttgactaccatctattttaatttggtttatctgcattaaattagttttatcttgacttctaattattatcatatcaattcctccatttacttaattcattttaatttctaagaaataatattttataattgatttatagattatttaaatttttaaacttagtattttattttttaatacgattatttatataaattacatctctaataaaaaattctcttaaagaatacttttttgataatactttgttttatttgtagattgcatttttgaccattataactaaattaaataatctaatgtattaaagcataaaattatctatgctactgatttattttatacatttggtaattttacttgcaaaaaattttgtacatattgtttatatctcaattaagggttttcaaaactttctatatatttattaattaattcagtttcttatttcaacataccacctctcatcaaattaccatttgtataattcatattatacatatacaaatggtaattttcaatatattttattattttaaccctttttttttatatttttggtaattttattttactttttatcaaaataacttataatttcggtaaggagtgatgtacatatggaaagtttaggagatagaatagcaaatctacgaaaagaattagatataaatcaaaaagaacttgctactaaagtcggtataactgaggctagcttgtcacgttatgaaaataatttaagagaacctaaaagtgaaataatagttagattagcaaaagcattagaaacatcaacagattatttattaggcgtaaatgataatacaaaaataagcaaagaagataaattaatcatagagaacttatcagtaagtgaaaaaacaaaaaagctcttagaaaaaatatattctcttgaaaaagaagatagagaagctatagaaaaaatgattgataatgcctatttaaaaagattccttaaagaagagaattaattctcttctttttctttatacaaaatctcaagtaataattcataaaaagtaatatcttcactcaataaatgttctaatttcattcctatatcttcaattttttctttttttgtaacagtagtgtttgacttttccacatataccatcccccaacaaacttacgttcttaatgctagtcagaaattcccaacaaatttttaataaagtttatgtaattgtattttgattttataaaatatattttgattatccaaaatttccctagataattatcttaattatataataatacttttattctacagttgcaataaaaaactcgtaataataacaaaaaaatctattattgtagaatcttgtatgttttttctatttttatatatttttcaggatgatttttattataaaattttttataaatatataatttttttatatttatttgactttcttttaattctttaggatggatttaaattttctataaaaatcatactattttagctgtttacttgcttatttgatagttttatttctttgattaaatatctttcagaatctaagccagatgtctcaaaaaaactgatttataatataatcattttttctgctattcttatttttccaattttagtttcatattaaaatatacttttcatagacactacattctttcatactcattttcacatttaactatacaagtagtcttactcatttatgtactatactttattaatatttattaagaaaaactcaaagatttaaaaatatatattttctataaagtatatttatgaattatttcatatcttcttttaaaataacattactaacttctctatgttcatttctatacttagttggagatatattataattccttttaaataagcgactaaaataatttatgctatcaaagccacatctcatagcaatttctgtcatatttaaatctgtttcctttaaataatatatagctttatcaagcctgattccatttataaaatcgattgtagtcttacctgttatttgcttaaatgttctacaaaagtgatgtgcactcaagttcacacgactagcaagttcttttaatgtaattttatccatatatttttcttctatcaagtcaaagatacattcaaatttttctaaagaatactttctttttataaattcatcttcagaatatattttatcaatatgacttcttaataagagtactattaattgatagatattagcttttatagataactcatatccaacttctttattgtgatattcatcaagtatagttgtaatacattttaaaatcagaaaatcattttgaattaaattattaaatacaatatgatttaaagccaatggtgctaagtacttagtttgtaacaaatcaacttgattactaaaaaggaatgtgggctcaatacgaatactatagaattttaaattatctgataagctttctaaataatgtaattcattactgtttgctattacaatatttccaggcactaccttaaaattatccaatccacattcaagatatgctataccatcaataaaataatatatttgtagatgctcatgccaatgtcttttaaagtttgctccttttttaatgtcatcctttaaaaaaatatctataaagttttcttgacctttcctattaaaatatgtatttttatccttcattattcccccctcatcaaaatagtgctaattataagcaatatagttattgtattcattatttcatatcgctattatataaaatgtaactatcattgtaaacattaacataatgccagtcattataataaggaggtaataaaaatgacaaactcttttaaaaaagatgataatagaaaaaaaatcacagttttatttgtagtcattgccatgacttttatggcaacattagattcgagtattataaatgttgctctcccagttcttgcaagcaaactaaatgtatctctagcatctattgaatgggtaatagcaagttactcaattattatttgttcaacactattattttttggaagacttggagatattattggtaaatcaagagtattccaagtaggtactattctctttacatcagcttcattactatgtggattaagtaattctttaactttacttatagtttgccgctttattcaaggaataggcgcttctgcctacatggcaaacaatcatggaattatcacagaactatttccaaaagaaagcagaggaaaagccctagggattctagttactgcagttgctattggaaatatggttggaccatctgtgggaggatttattttgtcaatatttgattggaatgttatattttttataaatattccaatcggtcttattgtaatctttttaaatacaaaatttcttcctaatagtaaaaaatcttcagaaaatatggataaaactggtgctatacttcaatttttaggaacaacattattttttagtgctctaattagtgctcaacaaacaggattactaaatccatatatattaattgcactattattatcaattatttttattatattatttttgatattagaaaaaaaacatcctcaaccgcttcttgatcttgaaatttttagaaattttaaattttcattgaatttaatttgtgctcttacatcattcatttgtattgcatcatcaagtattttaattccattttacttacaaagtactatgaaacttccccctattcaagcaggtttatttatgatactatcacctttgattttagccattttttcacctatatttgggaatatatcagataaaatcaagtcagaaaaaattattttaattggtcttctcgttatgagttttggattctttctaatgtcaagattgaaagaaagttctgcccttattttatttgtaatttatatatcgataatatcaataggacaagctatatttcaacctgctaacaatgctttgataatgtcaagctgttctagaagtaagctaggagttgtaggaagcataaattcccttgtaagaaatttaggacaagttataggtattactatttctacaacacttttatataattttatgagtattaaagctggatatagggtcaatgattatgtgattaataatgataaaatatttgtatttggaatgagaaatgtttatattattgttacacttgtttgcttaataggtgcaatattaattggcttttatttatttaaatataataaaaatgaacagtagttttttataattatattcaaattatgattatattataagaaacttactaaaatacttcctttgagttaaatttaatttggacatattgacttaaaaatgttttattaatttgataaaatatttcttttcctatagtttataaataaaaatcagctgagcaaaatatttagtatattatgctcaactgattcttttattatttaactaaaacttcaatattttcatcttttccatctataactatagtacatccattatacacatctccagcaataagtttctttgcaattatagtttctaatgtatttcctatatatctcttaagaggtcttgctccatatacagggtcatatccttctctcaccataacatcttttgctgaatttgtaacttcaatagtaatatctttttcttttaatctattttttaaatctttcataaatatatctataattttcttgatattttcttggtctaaaggcttaaacattataatatcatctactctgtttaaaaactcaggtttaaatctatgcttcatttcattcattactaaattgttagtagtctctgttatatttcctcctgcttctaatagataattacttcctatattagaagtcattattataagagtatttttaaagtctactgtcttacctttattatcagtaagtctaccatcatctaatatctgtaagaacatgttaaatacatcctcatgtgctttttctatctcatcaaatagtattacagaataaggagcacgtctaactgcttctgtaagttgaccaccctcttcatatcccacgtaccctggaggaggtccaactagtcttgatacagcatgtttttccatgtattcagacatatctattcttattatattatcgtcactatcgaataaatttctagcaagagtttttgcaagttcagttttaccaacacctgtagggcctaagaaaataaatgaaccaattggttttctttcatcttttaatcctgctcttgcacgtattactgcatttgaaactgctgtaactgcttcatcttgtccaataactcttttatgaagttcatcttctagtttaagtaatttttctctttctccttcaactagtttagttactggtatacctgtccactttgatacaatgctagatatttcttcttcagtaacttcttcttttaaaagagaattttcagaaccatcattcatattttcttcgtactgctttatttgttcttctaacttaggtatttcaccatatttaacctctgctgctttgttgaaatcatattctctttcatacttttcagctttacctttagcttcgtctaattgagcctttaagtttttaatatctaatatttgactcttttctttttcatattttgctgtcatttcatcatttttagattttaactctgctatttctttttgaatatcatccaatcttgatttgcttttatcatcattttctttaagtaatgcttctctttcagtttctaatgtaaataactttcttctaacaacatctaattctgttggcaatgaatctatttcactacgaatcatagctccagcttcatcaattaaatcaattgctttatctggtaaaaatctatcttgtatatatctatgagaaagttttgctgctgctacaatagcattatcatgtattcttactccatgatgtatctcaaatctttcttttaaacctctaagtatagatattgtgtcttcaacagtaggttcttctgcaattacaggctgaaaacgtctttcaagagccttatctttttctatatactttctatattcatcaaaagtagttgcaccaatacagttcaattcacctcttgcaagcataggtttaataagattacctgcatccattgaaccttctgttttaccagctccaacgatagtatgaatctcatctataaacagtataatctttccatcagaactttgaacttcttttaaaactgcctttaatctttcttcaaattcacctctatattttgcaccagcaattaaagctcccatatcaagtgagaatacaatcttatcttttaaaccttctgggacatctcctcttactattctctctgctaacccttctacaattgcagttttacctacacctggctcaccaatcaatacaggattattttttgttcttcttgataaaattcttataatccttcttatttcttcatctctcccaattacagggtctaatttatttttcttggctaaatctactaagtttgttccatatctagcaagtgcatcatatgtgccttctgggtcttgtgtttctactctttgactacctctcacttgtgataaaatatttaaaaagtcattcttatttatattatattgttttaatattttaccaacagctgattttgattctgtttccatcattgcaagcataacatgctctacacttatatatgaatctttaaattctttagaaatactctctgcctttataagcacctcatttatttttctagtagctgatactccttgtgagtcagcaccttctccatatacttttggaagcttatcaatttcaaagtttacagtatttctcaaagaatcaattgatatattcattttttcgattatatttggtatcaatccatcctcttgattaataagtgctgagaaaagatgaattacatctacttgttggttatgattttttactgcttcgttataagcctcatttaaacttttttgaactcttaaagtcattttttctacgtccatataaatccctccattttaatattatatccaaataaattaaattctctcatttataattattgattttctaagctctaaaagactatcaagtaaattctcgtttttttgtatatcgaaactcaatgttaaattaaatgttccatctgaattaaaaaaatcgaatacttcttttgattttgctattaaatacaagtcttcatctataagtcttttttcacctattaataaatactgacatttatctataaaactctttttaaaatcaatagtgtatagattttctaaaatattatattgataaatagcaatattattaaacacttttaatatgtttgaatttacaaaattgtaaatttgattattgttatacagtgatatttgttcgtatatatattccctaaataaaggatgaatgttttgcttaagttttaaagtaacttcagctggtatttcaaaataaagcttccagtacttagagttatttttttctaaaataaaagctactttgttcaaactggtagaactaatctcctttagtgtacaattaaaattatagtgtctcaaactagttttttcattctcaaatacatagtcaaaccactgtagaacatttctatcaagttttaaactcatataaaaaccttcttccttatttactaaccttattaggtctttttatctgattatattctgctaataaactttctttatcagctctactacctttatatgctatatgtggatttatcatatactcaccatttttcactctttgtaaaaaatccatttttttcaactccgtaaacaatgaagataaagaagtttttggatattcaaattcacaagataattcatataatgtttttctaatcttattatttttatccatagagtttattaattttaatggaattaaatccctcttagtatacattccttctactactttaatataattcttaaaacaaatattcatatacttacttttattcataactaaacttttgctctctgtatattcctgatttaaatccttttttaatgtcttatccaaattaaatatctcttctcactctccttatctctaattgataatataaatatattacaaaaaaatatgtatgtcaaaactgaaaatgcaaaaagtttaccttataagtaaacttttgtttagctataagctaaactttattatttttttaatttagtatttccaatttattggcaggatttttgaataatatttataaattttttaaaaaaatttaaatctatttaatatggcagcctttcataaaatacattacatttattaaatgtataatattggtaattagttttttctaaaatcagttgacatattatatatatatttatataatgtgtatatactatatatacaatttaaggaggtgacttattgaatatagttattagtaattcgagtgggaagccaatatatgaacagattactacacaaattaaaagtatgattataagcggagagttaccagaaggctcagctcttccaagtatgagactattggcaaaggaacttagaataagtgtaattactacaaaacgagcatatagcgatttagaacgagacggatttattgagacagttactggtaaaggcagttttgtatctagtaaaaacatggattttgtcaaagaagaacaatttcgtttaattgaagaatacctacaaaaagcagttgatacagcaaaaagtagtgatattacatatgacgaattaaaagatattttatttttattatataaaggagaatgataagtatggatgcaataactataaaaaatttaaataaaacttataaagattttagcctacaagatatatctttttcagtaccaaaagggagtgtaatgggatttgtaggtgaaaatggtgcaggaaaaacaactacattaaaagcaattttaaatttaatatcttatgatagtggaaatatagaaatatttggtcttgatagtaaaaaaaatgaaaaagaaattaaagagcaaattggggttgtatttgagggaagcaactttcatgaaaatttaaacactgaccatgtttcaaaaatcatgagtaaaatctataaaaattggaatgacacattatttaaagactacttaaaaaaattgagagtaccagacaataaattaattaaggagttttcaaaggggaataagatgaaacttagtattgctgtagccttatctcataaaccaaaattattaatactagatgaggcaactagttcacttgaccctatcgttcgtgaagaaatactagatatatttttagattttatacaagatgaagaacactctattatcttatcttcacatattacaagtgatttagataagatagcagactatattacatttatacataaaggaaaaattgtatttagtgaaaataaggatgaattaattgatactatgggagttttaaaatgtaaacctagtgattttgataacctttcaagagaggattattcatattatcgtaaaagccaatttggatatgaagtacttcttaaagataaacatagatttatatcaagaaatccaaattgtattgttgataatacgtctatagaagaaattatgttattttatgtgagaggtgataaataatgaaaggtttaattttaaaagatttacttaatttgaaaggaaatgtaaagtttatacttttattcatcattatgtttgggtttatgtcttctttaggagatggaaatgttaataactttataggtgttattatagttttatgtactacaatgattgtttcaacattttcatatgatgatttaaataaatgggatagttatgtacttacaatgcctattaatcgcaatgatattgtattaagtaaatatttaactatgttaatatttagctttataggtgttcttgtttcacttattgttagtgtaactattggttattttaaaaatacacttatattaaatgaaacactacttattaatgcactaatcttatcaatttcagtatgttttggtagccttattctaccacttatttataaatttggtacagaaagagctcgtttattaatgattttatgctttttagttccaacactagctttattagtttttaaaagtattttagaaaatattagttcacctatttctatagaaattatacttaatacactagtatattctcttccatttgttgctattttactatttgtgatttcatattttatatcatcaaaaatctatagtaaaaaagaagtataaaatatactatacatgtctctgtatttaagtattttaaataaaatactatcaagtttattttggtagtattttatttttttattattaatatctactaggtatttattgttttattacttatatttaataagactatttactactttctaatcttatttatataatttattcattttataaattgaactactaatgatattattgaacatagcaatagaataacatctaaaatagtttttatgtattaaattaacttattttaatattcaacaatttaggtttactaaatttattgatgatttctttttatataacttaaactacatttttattttaaaaaatttaatatcaacaatataaaattaagaataagtattattagtttgacattagcataaatgcctattagaataatgttaaactatattctttctactgattttattaaaaaataccaatatacaaaagattatacaaggagaaagttcaaatatggaattagaaattacagaaaaaatagaaaaacaagatgaagatactatttttcaaggattattaaaatataatcttgctagacttgaagataaaaacccagtggatttaggaatatatattcgagataaagcaggtaaaattgttgcaggttttataggtgttactcatggtaattggctttctataaaatacttatgggttagtgagaagcttagatataaaggtactggaagtcaacttttatataagactgaaaaaattgctaaagaacgaggttgtaaatatgtttttttagatacattcagttttcaagcacctaaattttatgagaaatttggataccataaagtattttcacttgaaaattatcctctaactggaaagagatattattatagaaaaatactataataataaaaatcatattttatatttttaacttaaaacttctgctcttcgtctacagactttatgtttttatatcattattaatactaaaatagtattttactatacatacaaaattatttgaaagttcaaaaattataagtataaaagctaatcttagcttaaataaaaattatatttttaggaggtaaatatgttaggaaaaaaatgtatggattatctacaaacattaggaaaaataagttcaacaacaaatggtcttacaagacttatcttgactcaagaacataaaaaatctattgatttaattagttcatggatggaaggtttaaatcttgatattgaaattgatgacattggaaacgttataggtacatataaatcaagctttccaaatgctcccacattagtagttgcatctcatcaagatagtgtaaagtgtggaggtatatttgatggtatgttaggtataatagtgcctctagttggtcttgaagaagcaaaacacaataataggtcttatcctttcaatattaagctaattgctttcgctgaagaggaaggaactagatttgaaacttctttaatgggaagtaaagtttttgctggtacttttaaagaggaacttcttaaatctgttgatgaaaatggaattacacttgaagaagctgtaacaaagtttggatttaatacaaaaaacttaacaaatttgcatcctagaaaagatgtagatgcatatttagaatttcatatcgagcagggtcctgttttagaaaatgaatctcttcctgctggaattgtatcaagtattacaggatttaaaagttttaagatatcagtaaatggtaagtctggacatgctggtacacttccaatgaatatgagacttgatgctggatgttgtgcctgtgaatgtgtattagctatcgaaaaagtagctaaaacgactgctgatttggttgctactgtaggaaagatgaatttctatccatcttcatcaaatgtggtacctgaaagagctgaatttacactcgatgtacgctcttgttcacaagaaattcttgataattctgtagaaaagatatttaatgaaatatcacatatatgtgaaaatagaaaacttaattatacaagtgaacttgcttttgaaaatgttcctgtaccatgttctaataaaataacaaaaatcatagaaaaaagttttatagatttaaatcttaatcctttttatatttatagtggtgctggccatgatgctcaggaaatggataatataactgatattggtatggtatttataagatgtgctgggggcgtaagtcataatcctaatgaaagtgtttctgtagatgacttggatactgctgtaaaaatatttttaaaaatactagataatcttgatttaaaataatttttatataagaaagtatattaaaatatataatctaaaaaatcactttatatttatattatacaagtgtacaatataatctattataaaatataattttatgcttttatagatttttattttatacataaatatatttatatataaaggagataatttttatgaatgaaaaattaattggtattttggctggaatgggtccaaggtcaacagccccttttgttgatttaattattgatgagtgtcaatctcaatatggagcaaaatatgatgatgaatttccaaagatgatgatatattcattacctaccccattttatattgaccgtccaataaatcatgaacttatgaaagaaactataattgatggattacaaaagcttgaatcaactggtgtaaattttattgcaatgccatgcaattcagcacatatatactttaaagaattaaaagagtctattaatataccaatattaaatattgtagaagaaacagttaaaaaattacctactatctcacaaaaagtaactcttttttcgactagttcaacttttgagtctacaatttaccagaatggtataatacataatggacatgaatttatatttaaagatgaatggcaaataaaattaaacaatcttattcaaaatataaaaatggataaagaaaatccacacaatattgatatttggaataaacttatcgaagatgttaaaaatgaatctatagaaaatatagtaattgcttgtactgatttaaatgtagttttagaaaaatcatatccttcaataaatattgttgattcatcaaaatgcttggctgaatcagttgtcaataaatatctaaaattagttaaataaatttttcatgcactatattataaaaaatatatgttataagtttattttaaatagtatagacttataacatatatcatagtttcttgacaatatagaaattaaccatgtatttcattatattaataaaaaggataccaaaaatggtatccttcataaatatttatatgtttatttataaaaataatcatatatttattactttactacacctaaacaatattattcaagtgtattcatagagttagaaaattcttgtcctgctgtaacaagattagataacaatacatcagctactgcatcatttactgaacttattatccatttattatcctttttagaacattcaaactctacagtttttgtaacataagtctctttaacgcttttttgtttttctttcataattgatactaacatttcagttgttttctcatcagttaagtcttgtcctgaaaaactcataccaatcatctttgtaaatgcctcagctactatttcttgaagtaatggtgttgaatctataaatttacattctactttgattgtagccttatcacctttaacctcgctgtcttttattgtatacgtgattttagatgcattctgttttagataatctaaaacatattgggcatttgggtcttttgtatctaattcctttaatatatccttatatttttcgtcattattttccattaccttattcatgccttcaaagtcaaactttttcgcactgttaaaaaaactatcaattgtatcttctggttttgcacttgaacatgctgttaaagatattgctaataaaaaagttgttaaagctaatatgatttttttcatatctcaaatcctccctcttaatttgttgatacataagttattttaacatataatgagagtttttgaataatatatttaaaatattttataaattttcattaaagtaaagtctatattaaaacatatctatattaaattattgttcatatttacatcagtcatagtagaaaccataacagcttttattgtatgcattctattttcagcttcttcaaatacctttgaatattttgaattaaatacctcgtttgtaacctctaattctgataatccgaacttttcataaatcttctgagcaaccttagtttctaaatcatgaaatgctggaagacagtgtaaaaatataacattttcattttcagttttctttatcatatccatatttacttgataatctttaagttgatttattcttgcttcatattgctcctcttctcccatagaaacccatacatctgtatatataacatctgcacctttaacatcatcaatattttcagtcaacattatatctcctttggatttcttggctatttccttcatttccttaaccaattcttcatttggccaaagttccttaggtgctagtgctacgaaatgtattcccattttagcacatcctatcatcagtgagtttcccatattatttctagcatcaccaacatatacaaatttaactttattcaaatctttatctacattttcaattactgttaaaaaatctgccagtatttgtgttggatgatattcatctgtaagtccattccaaacaggtacaccagaatattttgctagactttcaactgtttcttgtttaaagcctctaaattctattccatcatagaatcttcctagaacttttgctgtatctgatacagactcttttttacccatatgacaatcatttggacctagataagttacatatgctccttcatcatgagctgctacttcaaatgaacatctagttcttgttgatgttttctcaaataataaagctatattttttccttgtagcaaatcgccttttatgccaacttttttcttagtttttaaataacttgataaagttaataaatatctaatctcttcttttgtaaaatcctttaatgtcaaaaaactcttaccttttaaacttatattattcatattaattcgccccttcttataaacttcttaaattcaattaaacttgttagcactttacttttttatttacttctaatttttatctttaattaactattttttgaatatttagttaatctctagtaatatatcttttaggatttcaagagcctcatctatttccttataactgattgttaatggtggtaaaaatctcaatacattttttccagcagtcaaaataagcaatcctttttttctagctttctcttctataatactagattcaatattagtttcaattcctatcattagaccaataccttttgtctttaatacaactttattattaaaactttcaatagattttcttatataatttcctttttctaatacttcattataaaaaccatctttagatatctcatctaatacaactgaagctgccaccatagctaataaattacctccaaaagttgtaccttggtctccttttcctagtacttttgaaagttttttatttaccaatactcctcctactggtattcctgctcccaacccttttgctacggtaactatatctggttttacatcaaaatattcatagccaaaaagtttaccagttcttcctataccgcattggacttcatcaaaaatcactacaatatccttttcttgacatatttttactatttccaaaacataatctttttcaagaacattaactccaccttcgccttgaatcgcttcaagaattattgcacaaactgtggaatcaagattattttttaaatcttcaatattatttctttctatatatttaaaaccttcgggaagaggataaaaatacttatggtatttgtccataccagttgccattaaagacatcattgttctaccatgaaaagagtcttttaaacttatgatagttcctctaccattaccatatttgtcactactatactttcttgctattttgaatgctgtttcatttgcttctgttccagaattacaaaaatatactttagccattccacttgaattaattattttctctcctgaatacaacactggctcattaaaatataaatttgaagtatgtaataatttatctacttgctcttttagagcattctttaaattactattactatacccaagagaagatactccatatccacttgtaaaatctatgtatttattgccattagtatcaaaaaaacaacttccttcaccataatctatgacaaaattgggttggttatatgtatctataaaatattcattccattttgaaattgtattgttgttattcattcttattctcccctcttaaacttataattttattcattttcttttcttattaatgtacctattccactatcagtaaatagctctgttattatagaatgtggaactcttccatccaaaatatgtaccctatttactccgttatttaaggcatctacgcatccctctattttaggtatcatacctccagtaattataccttcttcaaataatttatcaacatcctctaatataacttctgttattaatgatttttcttcatctggctctcttaacaaaccagggacatctgtaagaagtatcaatttatctgcatttaactctttagctatagcagaagctgctgtgtcaccatttatattataagtctctccatcatctccaacacctatagttgcaattactgaaatataacctgactttagacaagattctataagctcaacatttacttttttgatttctcctacaaatccaagttcataatttttatatgggtcacataaaatcatattattatccattccacaaagccctactgcttttccaccttttgtatgtattttatttactaggtctttattaacctttccagcaagtaccatttttacaatttccatggtctcttcatctgtatatctaagaccatttacaaatttactttctatatccacttttgctagcatcttattgatttctgcccctccaccatgtactaaaactatattgattccaacataactcattaatacaaggtcttccataacagattcttttagaccatcttttttcattgcacttccaccatacttaactacaatagtctttccctgatgtttttctatatatggtaaagcttctataagtgtatttgctttttctatattaatcattaaagtatatcctcctaatttctataacttccatttattcttacataatcatagcttaaatcacatccccatgcatttcctctggcattgcccatatttaaatctactaatatacttatttcgtcatcttcaaggattttttttgctttttcctcattaaaatctaatccatttccatttttacatacttcaatatatcctttcatactctcaaaaataatatcaactttttccatatctatttcttcacctgcataacctaaagcacacagtattctaccccaatttgcgtcagctccaaatacagctgtctttactaatgaagaagatataactgtttttgctaattttactgcatgttcttcacttaatgctccatttatataacattcaattagttttgtacatccttctccatcttttgcaacaagtttagcaagttctatacagacatatgtaagtgcactcaaaaatacttgataatgttcatcttttttgtttattctatcattttttgcttttccatttgctagaatcatcaccatatcattagtacttgtatctccatctacactaactctattaaaacttttatcaacagcaattttcaaagcttcttttagcaaaactccatcaatatttgcatctgtagttataaatcctaacgttgttgccatattaggatgtatcatgccagaaccttttgccatacctccaatagttatttttttatctccatacattattgctactgctatttctttttttataatatcagttgtcataatagcttctcttgctccaatatgaccttgtttacttagattattcactaattcatccatattttcttctattaaatttatatttaatggctttcctatgacacctgtagatgcaaccaaaacatcattttctttaatatttaatttatcactagtgaatttagccattttataagcatttataagtccttcttttccattaaaggtattagcattagcactatttactatgatagcttgtgcttttccatttttaatgtgttcctgtgtaacataaacaggattgccctttactttattttgagttactactgctgctgcatcacataaaacatctgaataaaccaaagctaaatctcttttttctttattttttctcaagccacagtgaatccctgaagcaaaaaatccttctgaaactgtaactccaccctttataatctccatatttatcctcctaattatatgagtttagtattttttcattactaaaatgatggtgcaatattttttaaacctgtattttcttcaataccaaatattatattcatgttttgtatagcttgacctgctgctcccttaatcatattatctatagctgaacagattatcaatgtatctccattttcatgtaatgatatgacacatttatttgagaacctaacattctttaaagaagctaccttatctaatgggagaacttctataaattctttaaattcataataatcagttaattttctatgtatatcatttatagaaatattatcttcttttgtacaatatatagttgataagattcccctatttactggtattaagtttggtgtaaaaactacacttactttttctttgcaggattcacttaaattttgttctatttctggagtatgtctgtgtttccctattttatatgcagtgatattttcattaacctccgtaaagtgactactaatcgataattctctaccagcacctgtaagacctgatttagaatcaattattatattattattttttatcaatttagaacttagtaatggcatcaatggtaaagaaatactagttggataacatccaggatttgcaattatatctgcatcttttatatcttctttgtatatttcacttaatccatatacagcttttttatgtaagattttatctataaaagatactccataccatttactatatacttcttcatcttttattctaaagtcagcacctaaatctataactttctttttcgatttaattgcttttattacaaacttttcactaactccatgtggaagggctgtaaacacaacatcacacatatctataactttttcattttctatacatatcatgttatttttatatcctatacttggatatatatcaactatattttttccaacatacgaatttgaacctattgctgtcacttcgactttatcatgattcattaataatctaatcaactctgccccgacatatccagttgcgccaataataccaacttttattttattcattttgttccctccatttttatattcaaatagtattaaaattctatctttccactttactatatgataatcatttgataatatgtagattaaaatattctaattaaaacaaaaaaccccttagcattataaatactaagaggcgattttccgcggtaccactctcattggtaaaattacaataatcattaaaactcaaattaaaaagtatctacaaaatgtacatttaaaattaaaaaagcctcttggtcaaagaccaagagacgaatatacacccgcgttaccactctaattgataagataatcttacccactctaatctcttaaggcgagattcaccaattaccatactattacttctggtaatctcctccaaagctctattcacaataaaattcgttactaggcttccaccattcccagctctctatcaactagctttatgctactctctttttcacaggatttcaatttattttcttattgttttatatgatagtttatttttttaactttgtcaatataatttttaaatttttggaaatattttctatatggttaatttccagcattttgtatctaaattgagttataatctttatattatcattcatcaacttaagaaatttccaaaatatattggattataaaataatgtaatctcaaaatacaatatttacatctatttttagttaaatttttttaatgttggtatctaaaaatttctcaatctttttctcagaaagtatctcgttggttacaaattcaccattaaaaaaaagactgtatgtagtaaatggtgcaggagcattttgtgcttcttttgctgtttcgaattttataagatttacatcaatacctctagaatttgcaatttttttcaaaataggagcatatttttctgtatgtggacactgattactgtaatataaaactataccgttctcatttaattttcttttttttacacaattcttaaaacatggaataggagcattatcagtaaagggaaaatataatagctcataatttggttctgatgtatctgctaaacaaaagcccttatattttagatatttagcatcagataaaaaaggcatttttttactagacgaaagcacaactaatccatatttaccttttgattttgcatcatcaacacactcttgtagcaatagattagaatatccttgacccttaaattttccagatatccaaaaacagttaataaatatataattgtccgcagtaataggacaccatgcattttctgctggaatatattctataaaagctttacctcttacatcaaatcgtttaaaggctagacctttatcaaaattatttttcatccaagcttttttagaaaaaacacaattttctccttttttttcagaaattgaacagcatatatgtctactgtcaatattatttatatttatatctataatctgcatacttatctccttttctaattacataataatttttaaatatattctatatatttttatcttaatattttgaatacaacaacatcatgtcatatatatttttattttacataatattatttttagattatttgaattatcaaattgcatatataattaaatacattctaggtctaaccacactatatataaactatatattatcataatattctaaatttataaaacaaattgtattgaattaaatttatttaagatatataattataattataattaaaataataataaaggtgttgtttataatgttcaaagaatacttaataagagaattaaaagaagatgatattaaaaatgcattagacttaatctggaatgtatttgaagaatttgaatctccagattattgtgatgaaggaattacgacatttcatcaatttatagaatataattctattattgaaaaaatcaaagaaaaaacactcttcttttggggttgttttgactctaaaaaacttattggagtcttagctattagaaatttaaatcatatatgtatgttatttgtagataaaaactatcataaacatggtgttgcaaaaaaattaatgactacaggcatacaatactgtatttgtaataaatttaatttaactgaaataactgtaaattcatcaccttatgctgttgaagtttatcataaattaggatttgaagatattgctgttgagcaaattgttgacggtatacgttttacacctatgaaattgttaatataataaattaaataaaaagcaaagtctcttaaatattttatagttactttgcttttaaaccaagatttaaaataatactatcttttttgttttttaataatatactttaaaagccttactaatatgaactataatttattttttgatatcctttttgattaacatataaattaattcaattattaaacataaactatgttgtttctctttatatctcttctttgtaaacaatattgggcatttgaaaataaatattcttaaaatatactgttctcctgttgattttcctttggtacaaatgataaaattttaatttacatgctccgtaatgaagtgtttaataaataagttaaaataatttatttacctccttaatcatattttttatgaatacctaataacacagtatcaatagaatcggctaaaccttttatagcttcttctttactcaaaagtgatttcccaagttgcaaagtcgaataaccatgaagtacactcattattaagtttaatacttcacctgtattctttgtatttagattacaagaaagaataagtttttctaataaggatttatattcatcaaagatttctaatgtttcattatttccatgccaagtagcccactgaattgtttcataaacaccaggattagaaattataaaattaaagtatgctatacttatacactttatagctgtatctccaaaatttccaatagtcgcctttatcatttgactattcatctctctcattcctttatgagctacttcaagtaataaatcatctagactttctatatgattgtacaaagatggtgtacgtattcctagcttttctgcaataacttttaaagaaactttgttaagcccatctttattaactatatctgatgtagcttgtataactatttctctactaacacgcatgattttccctctttcatttaaaattaattactttattagtttagctaatctaattagtttcgtcaattattgtaatttataaaattctttatactcttataaaatcttgacagtttaattataatttaatataatactaattgaattagttttaatactaatataattagtattatattaaattatatattacaacattattttatagtttgattaattcaacaatcactaatatatcaaactgaaaggagatttttatggaaaaaaaatatttcgaaattcatggagttccttcaatcctttggggaaatccttcaagtaaattatatatttacatacatggacaatgcggcaataaagaggaggctgaagcttttgctaatattgcagttccacatgagtatcaagttttaagtgttgatttgcctgaacatggagaacgtaaaagagaaaaaaattcatttaacccatggcatgttgttccagaattagtatctattatggaatatgcaaagtgccactggaatcaaatttcgttatatgcaaatagcattggagcatggtttagtatgttaagctttgaaaaagagaacttaagagagtgtatttttgtatctccaattctagatatgcaacagctcatttcaaatatgatgctttgggcaaatgtatcagaagaacagcttaaacatgaactaattatcccaacttcatttgggcatactctttcatgggaatatctacaatatgtaaaacaacatcctatcactcaatggaatgtaccaacaaaaatattatatggtaaacatgatgaacttactgaaatcggtgttgtagagaaatttgtagaaaagtttaattgcaaccttactattctggaaaatggcaaacattggtttaacacaccacaagaattaaattcattatatgaatggttaaatactttagttaaataaaaaataattatattattaatatgattaaattatttataaatgttatttaattaattttattttagcattattaaaataactacataaagaataaattagttattattaaagaaattaaaagtatatagagtattaataattttttaataattagttattatagaaaaaagagggatataatattgtctccctctctttcttctgtaatattatataatttttatttatcactctcaataaattatagttatctacaaaattcaatctttaatacattattaatatattgtgatattaatattacagtattaaataaaatctaataaaattaactataaaatatctattatataaatatccactcttatgtttgaaatctgtcatatagttttatccttcttatcttttatatcaataactttttttaataaaattgacaaaacaaagtaaaaaaccttattgataatgaaacaaatgatactataagttctgatattatagtaattgcatataaatagacatcataacaataatataatattgtcactataaaattaaatgtaaaaatctccaatctaactaaatacacatataggtattttttaagtttttaggtatttcttctgaaaatgatttattgattgataccaatttacataatctttttaatataaacaatgatacaatatatgggacagcacatatgtatatagctacttatattacatattacagttggcatattcgtatttgtaatgcttataccaattttaaaatacaccatcagtactaatggcattaaaataatctataataaagttaaaattattccaattagtacaatattatttaatattttacaactcatattcttttttatataaatttaccaccttatacattcttatttttagtgtatattataatggttttatatattatatcaacaatttattattgaaattcaataaattatatattataatcaataatatactttatataaaggagatgatattttatgattacaaaattttttagtaatatattatcagtatttctatattttctattatcacttttaggagttgctggtataatattcttatgtatgatacctatgtttttatatgattttagttctgacaaagtaatcgctttaattgcaagaatactatatttttctgactactttatagtcatcttattcttgatatttataattaatagtactaagtattccccattcatacttgaaaatgtaaaaaggtttaaagtaatgggatgttgtttattgataaacactataattgaatgtgtaattggttataactcaaatactagtcttataatgatatttggagataatagtggcggtatctcaccacttatggttatttcttttatatttgcactaatgtgctttgtaattgcagaaacatttgataaagctataaaaataaaagaagataatgatttaacgatatagaggtgatgttatggcaatagtagttaacctagatgtaatgatggcaaaaaggaaaatatcacttaaagatttggcagaaaaaatagatattacaaatgcaaatttatcaattttaaaaactggaaaagcaaaagctattagatttaccactctaaacgaaatttgcaaagctttagactgtcagccaggtgatatacttgaatatgtagaagatgaaaatgattaaaaaagagtgtttagaaacactcttttttattatactatatgatttttattcttttactatattattgacattaatattaactttgtttaaagtcataacaaaatacgttctaagaaagaaactgttcctttttctatttgttatccattacctataagaactgtatcacactaaatcatacttttaaattgataattttgccacagattcctatatacattcttttctacctaatatttatttaaactgttagcaaaacatggaactttttcatttacttatacctccatttatattattgcatagtttatagctacgtgttataaattacattattgatgatttatctaacatttgtaatcttttagatactctttgaagttacaacactgttatactctaattaagtaaactaaatctgatacaagttggtgattatatgaaaagaaaactttcaacctattttaaaggatatattttaggtttatgtatagcatttttattatttacttttatattaaaaaaattaattatagaaaatatcattggaataataattggaactggaattgcatttttactgatttacctatttaataaaaaaagaaaataatattctataaaaaggtcttttagtgaatttacaaaaaattaataagaataatatatacttagtatttaaaaagggtaacaactctctctagctgttaccttatatatttatctatatctttagtattaagttttttaatttctacttttttaattatcaatttctgtatgtagatatactaaaccttccaacttgagatttaaataacttttcaatctcataaactattctatacaccttattttcgtactctaaatcataatacacatttatttcacctatactgtttacacttatcgtataatgttctttttctattatacatattcttccaaaatctgacaggtcattatctatcaattttaactgtttttttatttttgaaaaatctaatcttggaaatatgtcattaggataaaaacttttattatatacaagcatttcatccaccccttatttattctatttatatcattttataccctaattaataatttattaatcatctttttccatattattcaaattctcttatataaaaacaaaatcaatttagaatatgtattattaaatataaagtgactcaatctttatttaataagaaaaaacatttatattacatataattaatataaaactaatgaagtgggtgtatgaaagagaaaacacaattttaatttacattccatatagttaatataaaacagttgtttttattttttctaaagagaaaaaactagactttacattccatatagttaatataaaactttctgtatattttagttgtgttttaatattataacactttacattccatatagttaatataaaacatggcagtaactaagaagaaaactataccttttttattctttacattccatatagttaatataaaacgaggaaattttatactaatgactgatgctagatttaactttacattccatatagttaatataaaactattataaggagcattatacgaccaaaagccaaagcagctttacattccatatagttaatataaaacaagcaacagcaagagtcgcgacaacattaaaaacttcctttacattccatatagttaatataaaacctttatttttttctctatatcgagttcgccaaattcactctttacattccatatagttaatataaaacagtccagcgttgtgtggtcgtaacacaccaatcctactttacattccatatagttaatataaaaccccaaaataaattaagtatttccaatacttatacatatacaattctcctaaacttgcagtgagcgagcaatagtgcaattgataacagttatcatacactctcaacgctttatatttcaactattaaaccctactttatcacaaaaatcgctcactgcaaaacttttatatttttattatatcataaaactcatactataaaataaaaatgggataattttacaaactaaaagcatctacattcttataagtatttattatattctctattccaatgattcctttttctttttattgcatccttcctatgtaatcgcactttagctcaacaagtcttttattttcattaacaattttttaaactattcaaaatcatcaaatttttcatcttatacagttaaatcaaaatacgtgttatatctctttatctatatacttttcttccttccatttctttttctctttctacattttcactttgttactttacaatctcaaggttattatctgctattaaagttttatctttccaggtttcacaaaaataaattgaataagtgcaaaaataacagatacaaaaccataactattttcttttctataaaaaaatatatcatcaacaagaaacataataaatgaaaataactatgaataaatactctcatttagaagaaatagacaaagatattccttaaaatttaagcaaaatattgtttaaataaaaaaactgactgtcagttaaatgccagtcagctattttatatattttatccaaacatcactatatttgaacattttaataattaataatacttattaatatacaaactttactcatacacagaatatcttttccaaatttgctctaaatcatcaaaatgctgtttaatatcttctttttccttcattccaacagatatagcaagggcatttgaaatactaagagctggaactagagaatctacaaatgaagccatattactcttaactagaagagtgttatctgcaagtgatgctactggcgcaaataagctatctgttaatgatattacatgggctcctttttctttagcataattgacaatttgataagatttcttagaataacgagggaaactaatagcaactattacatcttcttcatttattcttacaatctgctcaaaagcatctcccatatccattctaattatatgaacattgtcaagtattatatctaagtaaaaacctaaatattgagctactacaaaagaactcctcattccaagtatatatatttttctcgctcttaaaagtttgttagaagcttctttaaacgctctctcgtcaatttcttctagtgtagaccttatattatctatatcactttttaaaactttgtttagtattgcaaaatcatcggaataatcatgtgccatttcaactctttgtactgtagttagtttattttttatgagttcttgaagtgcagcttgtaatttaggatatccactataacctaatgcatttgcaaatcttacaactgtagactcacttactcctacggtttcacccaatttacatgcagtcataaatgcaactttatcataattatttaaaatgtattgtgctataagtttttgacccttactcaatctcgtatattgagattgtatatttgatatcaaatgtttactgtccttcatttcatttgtttcttccatttttttctccttttagttatataaactattttgttttattaacactgtctttttctctaaaaattttattttttatctcaatttcatcttagtttttatcatagcttcttaaactcataaaattctaacttttctgtaccttatacttcacatagtattttcgattaaatttattataccatctttccttgcattttttaatatttatccaatatttcttttaaatttttcaatttttactcatttaaaagttatctatcttattttgcatatttagatgtatattttgttttgagaataagctgttgtatacttattatttaaagtatttttaataggtcacactatatatattaactcttaatagaatcttgtcaagttttttagtatttattatgcttttttcttttcaattaaaatcaattgtggtgggttattgacttgatttaaaaacttagattctaaaacattaaattcatcttgatttaaattattgacaaggttatatatgcaatctttttcttcttgacctccatcatgccctgtatatatggcaatgcttattactccattttcttttaacatttctaaacttaactttatagcctttaaagttgtatctggtttggttataattgaatgtttcgctcttggaagataacccaaattaaataaaacacatgaaacttcttcttttatatattgattcattttttcatgcccatcaaatatcaactttactctatctgtatatccttctttctctagtttctttcttgtagactttattgcttcttcttgtatatcaaaagcatatacaaagcccttttctccaaccttctcagctagataccttgtatcatacccatttcccatagtagcatcaattactatgtccccttcatttataatattttctaaataaaatttatttatatctgtaattttagttaaatactttgcatatgccataatactatttctccctactattaactttatttcattttttctcaatttatttttatcttattttattgattttaaatattttatttcatcttctgttaggtatctatattctccaactttggtgtcttttaatactattttccccacagaaatccttcttaaatttaaaactggatgatttatagctttgcacatttttcttacttgtctatttctaccctcatgtatagttatttcacacactgaataatttttttctttattttctttagttacccttattttggcaggtgccgttgtgtaatcttctatttttagtcctgtttcgaattgtcttatctcatcatcacttataattcccttcacacttgccacatacgttttatcaatttcatgctttggatgggtaagcttatatgttaaatcgccatcattagtaagtattaataaaccactagtttcataatctaatctccctattggatatactctttcccttacatctttaagtatgtctattacactgggtctattgaattggtcttttactgtagttatatatccctctggtttatttaatactatatatatataattttcacttggttttacttttttattatcaaattctactatgtctttttcttcatcaatattaaaagataactcttttactacacttccatttacctttattcttcctccaagaattatttcttctgattttcttcttgatgctattccacaagaagctatatacttattaattctcatacttaatccttccttatcttaaattatgtgtgtttaatatttttatcaatgttaattttgctacattattatactatactagaccttaattaaaaacaagcaaaaaaattatttaattttcctaaataattgtaatttcttttcacatactattaatatgtaatagctgactaaacactattttaaggaagtgattattattttaaaggaaaatataaaatattatttaatagtcgtgtttattggaattttattttttaaatttattaatactccatcaaactttatatctagtattgaaggattcttaaagttttttagcccatttttattagctattttacttgctttacttttaaatccacttgtgatgctttttgaggtaaaattcaaagcacatagacttttagccatttttttatcttatatatttataggttttattttagcctttgccattaggctattaattccatcaatagctaatacattaaatagattgataaatgaaatgcctatgtatactgattatatagatagttttatagaaaaaaatatgtcaaacatagattttctaaaaactttaattcctcatatacaacatagtttagataatttattaaaagaagcaagtaattttgttggtaaaattcctaaaaacttcttaatctatacacttagtatatcttctatgctatttaatatgacaatgggatttatactatccatatacattatatatgacaaagaaaaaattgcattgggatttaagagatttctatattcttctactgctagaaacaaggcagataacattatagaattttttaggactactcatgatattttctatgattatttacttggtagaatattagactctcttattattggtataattgcatttttaggatttcaatttgttatcagaatagaaaatgctttatttttagcttcaataatattcttaggtaatataattccctattttggtccttttattggtgcaatccctccaatagccatgactatattatatagtccacaaaaaactatatgggtcattgcatttctatttatattgcaacaattagatggaaattttatagaaccaaaagttatgggtaatcaagttggtataggagctatatgggtaatatctgctattttggtgggacaatctctatttggtttcataggagtttttctttcagtaccaatagctgctgttgtaaaaacttatgttgataaatatatagataatcgtttacaatagcttatctctactgtgactttaatttttagtttaaaatttaactgttatttattaaattatttctcaaaaaatatctcttagtaagaaaaaattgctaagagatattttttataatatataatttgttcattaaatttatgcatatattttatacttattgattatttgagttttgagaatttccaccactatctgaaccaccagtagtatcttgtggagttggtgctggtgttggattactattatttggcttttcttgattttgagaagaactgttattattgtcagacttattactatctgattttttatcattatttttagaactatatttattatttttactacttccactataagaagatttccttgcatctgattcaactctatacctatcttctccagccgtatcttttgcctttttctttctttgttcctctgcttcgttttgttctttttctaatttagttaactcttctttctttttagttgcctcttctttaataacagaggaaccatttttgattttctctataagtttaagttccttgattgcaccctcataattttttaattcttcaaactccgtcatatttgacattctcatagcttgcatatacatagctcttgcattctcattagtactatcttcttccagtgcagaggataatgattccatagcttttttatagttatgtttttctaaatatgtttttccttgctctactaaatttatttcatcttttttattaaatgaacatcctacaagaaatatagataatatcgatattaataaaattactcttcctctcattaaatccctccttgtcatatactttaaattttatcataattataaagtttttaaaatattttatatttattacaagaaatttgttagtaaaacaaaaaataagcagatatgctacgaacgatacaataaaccaaaaattaatttagagatacatatcctagcaaatctgctcataataaactttaatatttaatttttattatatacttttccattttatatctctaaagctaataagtcctcatagctttgtctcttacaaattatcttatcatttccatcaaatactgatactactgctgctcttggtattttattataatttgaagacattgaatatccatatgcaccagttgatgttgttataagtatatctccacttttaatatccattatgtttatatctccaattaatatatctccactctcacaacattttccagctattgttacatgattcatagcctcatgattaattttattcacaatactacactcataactagcttggtacaacgaaggtcttacattatctgtcatacctccatctacacttacataaaccctaacatcttttatatcttttatagaacctactgtatacaatgtacttcctgcatttgcaactattgatcttcctggttctattaccaatgtaggtacttctattccaagctctttacatgaagtttctgctttagtgattatggtttcacaaaactcttttatagttttaggtttatctccttcgctataataaacgccaactcctccacctaagtcaatttctgttagttgtatgttgaatttttcttttatttcttttaccaagttcatcattatatccactgtatctatgtatggttctacatcaaatatttgtgaacctatatgagcgtgaagacctacaagtttaatatttttatattcacttaatttttctattgctctaaataaatctccatttactaaagcaaatccaaatttagaatctatctgtccagtttttatataatcatgtgtatgagcttctataccaggagttattctaaagtatatctcttgagttttacctttatcttcacataatgcttcaagcaaatctaattcataaaaattatccactacaaatttacctacacctaaatctaatcccatgtttatttcttctttagtcttattgtttccatgaaagaaaactttttccataggaaaatttgatttataagctgtatataactcgcctcctgaaactacatctaaacacatttgttcttcatttataagattacacatgtaaagaggtaaaaaagctttccctgcataagcaaccttattttttccctctctagccttaaaatattctatatattctctacaattttgtctaactaaagcttcatcaaatacataaagtggagtttgatattttttactaagttctaaacaactcactcctccaatatataattcatcattatttacagtcatagttccatgaagtttcataatagcctccccaaattttatatattaaatacttctgctattttttctatagctacttgcttatcatcagaatttatagcacaagttatacgaatctctgatgtagttataagttttatcattataccattttcattgaatatcttaaatactttagcagcaactccagaagtatttttcataccaagacctactaaagaaaatttagtgatattattatcaatcactacatgttcttcatctgtatatttagatactatctttttacattctcccaactcttcttttggaactgtaaatgatacacttatcttatctaaaataggtgcagtttggcttatcatatctacacttatacctatagttgctatatcttcaaataagctagatatattttcagctttaaaatcttttattgttatagaactgtcatcatcactagtagctaatcctgttattactttatcctctaatttcatgtcttttccccctcttatatatgttcctttttctgtaccacatgtacgtccgacatagatttcaacaccatatttttgtgcaagctctatacttcttgaatgcattacttgtgctcctaaactcgctaactcaagcatttcttcatattcaatctcatcaagtttactagcctttgaatattttcttgggtctgtaaaataaattccatcaacatctgtatatatctcacattttccatttaatttaaccgcaagagctacagcagacgtatctgaaccacctcttccaagagtggttacatcaccatcttcgttgattccctgaaatccagttactatcacgacatttccttcatctaaactatttttaattctgtttacgtttatatcatcaatttgagactttccatgaagaccactcgtttttatatttaactgataagcattataacttatagctttacatccaagtgcatttaatgctattgataataaagatgctgaaatcatttcaccagtagacattaaagcatctaattccctcttactaggttcattactcaattcctttgctaaagttatatattcatcagtggattttcccatggcagacacaactattaccatttgtggattttcttttcttcgttctattatattttctgctattgattttattttttcagtatctgctactgaacttccaccatatttttgaacaattatactcatgctttctccccctcaagctaaattttgataaataaaaacgcccaaaggtatactttggacgtgtaaatttcatagaccaagtaaccttgtagctcaccactttaaaagtgacagccttatgcatattctgcataagtccagaaaatttgtccgtcaacaaaatttcttcggctatataccctttcatcaattatcaatgcttaccagctcctattgaatactattgaatacagctacctctaccctaggctcattatttttaattaatttattaatatagttttatcatattctatataatattgcaacaattattttacaaaatgtggcaaatcgatagttttcttttctaaagttagcttatatacaattaaatagtttatttaatcctaaatctataaaatttatgctatactcattatcatatctctctaaatcatttaattcggatagattatctggtgtaactaccaaaacgtttggtactttaaaaaatggaattgtagatttatctatttttttagaaagattttcgtatttagaaatgtctatttcattatttaagtcaacatcaactaaaacttgctttatattaccaaattggtctgtatattcaataaataaatcgtatttcacatcatctacactaacatttcggtaaaatctttttacatcacaacctgcagtattgattctaacaactaattctgatcctactagagcctttattaaatcatctcccttaaaaagtttactaccgtttaaataatatacataagagaggtctttataattataataatccacatcacaaggatatttttttagtgtatattcactacacatttttctcaaagtttttttaaaattttttttattgtatcttttttggtctccataaatttttctaaattgagactctgtaacacatctaaccctgctaattaaaagtaatatctctttttccatattcgtcatagtacattctccttgaagtattatttgcaaagttgtactaatattatattaattttatgacattaaatttacaaagaattaaaataaaatagctaatttttatagaattaaattctataaaaattagctatcactatgttaaatactattatcaatctttttatttaaattatacattaccttgattttcagaatctttggaatctgtattttcatcagttcctgttttttcttttgcttttttatcttcaaagtttgcaatatttaggttatcaaattctgacatttctattacaccagattcttcttttgaatacgatattttgactttatcaccaacctgagtcaatggcaattcgctagatacttttgaagtagccctaaatattatatctttatttgaatctaaagttacataataattagtgttaccacctcgcacatctgggcttattcttgtcactgtgccttctaatacctcatcttttaaatcattatcaagttttaaatcattacccttagattctaatgcatccttatagtttcttaatgcttcattcttatcttcacctattccaagtacattataatcttcaacagatacaaatgcaactctcttaacaagaccagccttatcttttaatgatgatacatatgttggctgacccaatatattatacattacagggaacgtcgcttcataatttttttcttgaacattaccttcagctgatttcattgcagccgtttcagtagctcctggttgtttatataatctagcttcttttgttctagaatcaactaacataaatccaattgtagattcatctccacctgaagatgttatacctgtataccaataagacctgttatcattgccataaactaatgatgtaccttctgttggtactaaaactcccttttctgatataacagagtttaaaaatccattaacataaacaccccagtctttaatctggtctgttacaaagctttgtggttgtattctatccacccatttaggtgtgtttttaacatcataaacatttatttttccagtttctgcatcaacagtggctattcctgttgcatttgctcctccatagccaattttatgttcatataaacttacaacccaataaggtcttccttcatcatttatttcaagagtgaaatctgtcataccaacatttacaataccatgtatgtataaatgtctttgtaaatcctgatgtaagtaggcttctggttggtaaactatctttattggctttccatctatttcttgaactaattggacgtcttgaggattactagctgatacttttacataaccacttgtaccacttagagatgttatccatttaattatgtctctgtgaacaagaggcgctacccagtacaactctccatctacattttgtatatgaaattttcctaatttggatacactccctattgcaggaacttctccaagctttttgtcacctaatttcattgccatatcttcatctacaagacgaatgtcatttacactgacagggctaatgtcatcagtaaatttactttcagttacttttcccaatagttctctatatgattttgcatgaagtacaggtgtagaagttataaagggaactactacaatatacacaagcaaagctattgctattgaaaaattatatttagccattttagatgctctttcatttctatctaacatcatatctagtattcctgctacaacaaagaaaattattcctactgaaaataaagatgtaaaatctaatcttagtacaggtaatttaataaatgcataaattattacaattattaatgcaactccatatgttttaagatatcgtttcatttaatactcctctctaaaaaatgttattattattattatatccatatatttacaaaaaataaatatttatcatatttattatatattaagatatctttatatatttatagttctgcttattcaactatatttaacattatacgtgtatgtataaatactttttatacactgtttgtgctatccatcccgcacctaaaggagtgggatttttgcactattctgtattatatatatccaaaaatattataaaaatacaaatattagcagaaatttaaaaactgaagaaagtattctaactaagatttacaaattcttaatcctatcgaagttaaactactatcttcagcctaattatctagcaatatttttttatatgaaaaactctaaatcaagtttttaaatgtttgcgatttttgatacataagaatgttgtctagaattatattctgataataaaccttcatactctaaggttaagccagataaattataaaaatcatttggcgttacttcaaatgcttgtttatttaaaatgtctatctcacttttttctaacatgtcagcaacaaagtttgaacatacatatttatattcagattgtctctgaatattcattagtaaatatattaatgccattgtatcgtaatagtaatcttctctataatcactaattaattttatatttttatatagattttcatattgtaaattatctacttctaacgaatataccctacacacagtgttttttcttatagcatacaatccttgatttatattttcttcaacaaatcctccaataaatggattccttggatttagccttccaaaagaatacattggttttagattttcatttaatgatattgacacatgtgtatacagctttttacttatattccttattaagtaagataatatagttcctgtatatgttgttacaatatagactttattcatcatttccccccaatctagtaactaaatgatattatacacttacaatttaatatcataagatattctaacataataaatgtggttttacaaattttgattttaaggtactttaatattatataatataataaaaatataaatataagttttctatatttttaaccaacagatgttttcttcaaattaatcagatgatttagtatatcttgaacctttccagagtcctttaaatatcctaatgccccatttatttgtgattttaaatctatttctacttccatatccaaatcaacatttcctttttttatagatatatttttaagtgttattgggtaaagataacttttttccaaagtaatcttatttccattaacctcaaatggaacttttttattgtagttacttaatattttttctagcattttatcacttagtttaaattttccaattttcacattctcaagacttacaactaagtttccatcctttaaagtaggtctcaattcaagttcatattgactatttaccaaaccaaataccttatatggtcctgctacctttattttaccatttttcatttcaacaaaattattttcaagttcattaattccatgcttctgcatcaatgtatatattaaatttttaaactcttcctctgaaacagatatttttccaaccattctaagtggattttttactacctccatagaatttatatatgagccttttgataaatattcttcatctatgattttattattttgtgaactaacatcatatctttcttttggtgtcaagatatatacaacaattcctgcaagtactaaaacaataacaattaaacttaacaaaatctttgcaacctttcccataatcgtctcctttacaaatctgtcatcagatttaaaataaatttagataactaacttcacataatattcttaacaatatacatactataatacagtcttttaaaaattaattcaaccaatctaatgttttgtaaataaactgtaaaaacatgtttttagtataaaagttaatattttgcataatactcttaattacacctttatttttttctaatcttggattaaaattaatattatgcaatacagtgtagtgttctgtattataatcaaattaaataggaggtatagaatatgtcaaatgaaacgaactcatctaactttataaagaatattattataaacgacttagaaacaggaaaacatgacagtatcataactcgttttccacctgagccaaacggatatttacatattggtcatgcaaaaagtatatgtcttaattttggattagctaaggagtttaatggaaaagctaatttaagatttgatgatacaaacccattaaaagaggatgttgaatatgtagagtccataaaagaagatgtaaagtggttaggatttgattggaacgagttaaattttgcatctaactactttgatgaaatgtataagagagctttaatactaataaaaaagggtaaagcttatgtatgtgatttgacacaagaggaaatgagagaatatcgtggtactctaactgaaccaggaaaagaaagtcctcatagaaacagaactattgaagaaaaccttgatttatttgaaagaatgaaaaatggtgaatttaaagatggtgaaaaaacattaagagccaaaatagatatgtcttctccaaatataaaccttagagacccaattatatatagaatatctcattcaacacaccataatacaggagataaatggtgcatatatcctatgtatgcttttgctcatccaattgaagatgcaattgaaggaataactcactctatatgtactttagagtttgaagaccaaagacctctttatgattggtttgttaaagaatgtgagatggaaaatatacctagacaaatagaatttgctagacttaatataaataatactgtcatgagtaaaaggaaattaaaacaacttgtagatgagggtattgttgatggttgggatgaccctcgtgttcctacaatatccggaatcagacgtaagggatatactgcagaagcattgcgcaatttctgtagtgaaataggggtatcaaaagttaactctacggtagatagtcaaatgcttgattatttcctaagagaaaacttacaaccaaaggctcctcttactatgggagttttaagacctttaaaacttattataactaattacccagaagataagattgagatgcttgaaatagagaataatgctaaagatgaatctcaaggaaagagattagttcctttctctagagaattgtatatagaacaagatgattttatggaagaacctgttaagaaatattttagatttttcccaggaaatgaagtccgtttaaaaggtgcttattttgtaaaatgtactgatgtaattaaggatgaaaatggaaatgtagttgaaatacatggtacttatgaccctgaaactaagagtggctctggctttacaggacgtaaggtaaaatctacaatacattgggttgatgctaaatcagctataccatgtgaatttagattatttgaaccattaattcttgatgatatacctgaaaatgaaggtaaacatttcttagaacaaataaatcctaattcattggaaatattacaaggttttgttgaacctacacagataaaagattctaaaccttttgataaattccaatttgttagaaatggattctttagtatagataataaatatacaactgacgaaaaatttgtatttaatagaatagttcctctaaaaagttcttttaaaccaggtaaataatcttacaatcaaaaaatgaagacttaaaatataaattacttctactataaataaacttagttagaagtaattttttatttgagtcttcatcatttactttaaatgattaacttttttcactacagattcccataacttctattccatcttttatgcattctatgttaagaggaaaatctggtcctttttctccgtcaatatctgttataagtgaatcttcacattctatatgcacctttttagttttaaagtatagtatttcatttccattatattgatctaaataatcacctctaagcacacttatcaaaactggtattgattttggtattggcattcctttaaaaataattacatccaaatatccatcatctatttcagccttatatgctagatttatatttcctgctgttttgccattaaaaatcaacataagatacatatctccatcataatacatttcctcagaagatacttttatcttaaatttcctcatatacaatgcttcttctattccctttatataataagaaattcttccaaatgaattttttaagtctgtgtttatcctttgtgatacatctgtaaacataccagcacttgcaacatttataaagtacttattattgactttccctatgtctattttctttggttttgaatttatgatttcatttatagcttcttttatatcaaatgaaatttgaagagcatttgaaaaatcatttgcagttcctgtaggcaaaattccaattggaatttttatgtctaattctttcattgcatttactactaaatctacagtaccatctccaccagctatcaatatgtgttcataagaactatcaacttccttaaatgcattctttacaggttctttaatagttaatctatagggtatcaataaataatttttttcttgatataattctatgatagtgtctaaatttgataatatctttttttcacctgaattaggattgtatataagttttacttttttcattatttctccttactcattttattcttttagtatccaaaatcttcatttaaaaaaatcacatgtattctttctggtgttaattgtctttttataagtgtataactacagcatattcttcctggacttgaacagtctatacatataccagtagtcttacatccagtatttgtacttaatcttttacaattggctggagcagctattgtttttgttctttttatagcttcatctacatctttaactattttatttactcctgctataactattactttatcaggtccatatatcatagcagcaactctattcccattcccatctaaattgtaaagttctccatcctctgttatcgcattagtacttgtaaaataagcatctgcagaaaatgactttctatatatttctttcatttcttctggtttgatatcttttgcatatctatcaagaaaattatatttttctcttataaaatcaatcactcctgtttcaaataaggtcatagaacctccacatcctactagagaacctactttaactatttcttcaatttttttaagaagctcttctttgttacttactaaataccctttcatattattgttttccagagattttattgttttttctattcttttttcattaagccaatttaaattttgatccattttaacttcccccttatttttaatatgtacttaattatttataaactttattgtctttataagtttattttagtacatctaaaaaaaaatacaatataaaacttaaatagttttatataattttttccaaaataacttactcaatcaaaaaaggaaagtagatgtactattctactttccctatattgtatgtagtatttattgcctaaaatctatatattaattatatgtttcatattatataatatcacagttaattaaaatgtaatactatcttctttttaaacatataaattgtattattaaatttaatatatccaacttcaataaatcttattaatttgatgaagaagatgctatagctgcacttgttgctgccattacacatgcaatttgaatagcaacaacaatatttaaaaatatattattagttatagagcctatattattctcatttcgtatcaaatctgcataaattgaagctacaatagcagaactaatcattactctattactttttcctaaagaccaatttccaaagcctttttcttctttaagtttatttgaaacattttttatctcttctattatttcatcttctctataatctaataatgaaattgctcctattattggatatccataataattcattttacaatcattttctttaaatgcttttttaagttcaatagtctttttacatttaagcatagttctatcatcactaaataaaagaatttgggataatgcttgtaaatcatttcctttataaaaaccattttcatttagaaattcataacatttttctatgtattctaaatcttcatctaaattttttgaatgaattgcaataagtgctatattacaatagtcatcactagaagttagaaatggatgttttttcctcatgtaatcatatattattttcatttttgatatacatgtaagataatccattttctctctattttcataaactattgatgctgtaagtggtaaatatgtatcgccccaaaacttttcacttttaagttctttgtatatatctaaaatcatcttaaaactactttctggatttgattcaaacgaaagtagtgttgccatataaaacatattatatcctctaaaattagagaataatccagtattttttttaataagctctattcgttcttccactaatctaggacttattctcttgttcttaagagtaaatgcaagtgcacaactatgttgtatcaatcccatttgccaagaacctttaacttcatttaatgctttgtaattttctattaataagtttacttttccatttataaacgattgttccatattgccctcctagtaatatatctcattgtactaatagttttatatttattatatatatattaaatactacaatcaatacatattacttcaaagaacatcattcttcaacaataatgtagccttttttgtaatgtcttcccatattattgactctatcatagtactctgattcactttcattactccatttgggcacaaatacatctattgcattagaattactaaaatacttactagaccccctatccataacagtttttaattttccatctacaataatcttagttccaaaactcaagtgattgtttgctacaaaaccatcttctaaatcatctcctgtagcagttatcgctccatatccattttcttgattaagacttgtgtaataactaacttcaaaagttataggtactaacttctttattttaatacctaactgattttgtagtttctccttttgtactttcaacttatactcatcactatttttataatcttccataccttgattatacttggaattaaagcttttacctgactttactatagtatctatatttactatagattctttacaatgatctgcatctatttttgtttctccatttaccaataatggagttaaacatacactacatacaacacatgtaatcaatgcttctttaagcttcataaattccccccttattattttgatatattagcatatttaatattatatgtctatatttagatttaaataccacacccatttgctttaagaagttgtcttatatttaattcaccttaaacacttataaatcctctatcttagaatcatatagaataaagcttttatcgttaaatattttttattaatcttttaaaatctaaagctactttatttaattttctcttttttagaatttaagaattaaaattctataattttaaaacatattgaatttatttttttgagatgatataattttcttaagaggtggttgatatgataaaaaatacaaaacaaattacagtagaagttaatgaaattttattacaagaaatatctaagataactaatgacgaaaataatattttgacagatttgataaatgaatcaattgtaaattatattcttgaaaacaaaaaacataacattgaaaataaagatttagaagaagtgattaaattttacaaaaaagaaaatactgaaaaacctaaaagtgcagcaagagctatagctgaagcaaaaactcataccctgtattaatcaaataaaaaagttcctaaaaactaggaacttttttatattaataattattaatatatctcaatatttatctcaaatttatcaatataagcatgtttaatacaatctattgtatacttatcttaccctagaaataatcaaaacaaaaattatgccctttatatctaacaattaatttacatgattaatatacaaaaattctgacttttaaattcgtatacaatatcaaactaaaataatactaatgacaaacccaatataaattaaattcaaacaggtttgattttacatcaaacttattgtattaatattaaataacaagacaaaatatttataaaaattacaaattttacataaaactttatattttattcatttaactaattattgtaaaaactatttattttatgataattaactacaccaaattattcatcttttttaatatctttaacccatttttcaacagagttcaattcttcttcatttaccccctttttgaacaaggatttcataaaactctcaatagaacttccatgcatattatctaaaaaagtttttgtttcaaaatgtaaatactcttcttctccaataagaactgtataatgtgtatgtctatcaatctttcttgcacttaagaattgcttatttactaatcttgataaaagtgttagtgttgtagtttgcttccaattatatagtttttccatagcttcaatgacatcttttgatgctactgtaaaatctgaactccaaataaatttcatgacttttaattctgctggtggtatcttagtaatagtcatatgattttacactcctctcaaacttctacataattaaatactatattaatagacttttcgagtcaaaggttttatttaaaatatctcatccaaatttattaatacaaaaaatttatatttttattcaaaattaaacacacaatctattaatataaagataaatatctattctataagtataacagattatcaaattaaaattctaatatttgacataatatatacattttttaaataaatatatacaatgtattaaaatgtatgcaactctatttcaaaattattttgtgatatatatatgttataataaatgtataaaattttgattggtgggttatatatgaatgcatttattagaaaaagaaataaaaactatgttgtttacctggaatttgaagatgaaaagacaggtaaaagaaaacaaaaaaatatgggtacttttgataaaaaaagggaagcaagtaaaagactaaatgaggtaaaagaaagcttatataatgatggttttttagtaccaagcgaaattacagtgtcagaatttctattagattttctaaataaatatagtgaaaatatatctttagctacatataataattatgttagtatttgtaaaaattacattaatccatctattggaaaatataaaatacaagacttacatccggttcacatacaaaactacatagataaactatcttataaactaaatcctcaatcaattaagattcatataaatatattgaaacttgcaataaaaagagcttatagactcaaattaataaaagaaaatgttatggatagtatagaggctccaagatataaaaaatttaaaaatgagatttatgatagagaacaaatgataaaattattagatttagcaaaaaatacagaaatggaattacctattaatttggctattggattaggtcttagaatttcagaagttttaggtctaacttgggataatattgattttgaagaaaatacaataacagtaaataagataacttcccgaattaatggttctgttattctcaaagagccaaagacagaaagctctgttagaaaaatatcttctcccaaagaattaatgtctttattaaaagaatataaaataaaacagaataaaaatttattaaaatcttccattagaaataataataatttgttgtttttcaataagaaatgtgaacctattgctgaagatgttatgagtaaaaaatttaaaagatttttagaaaagaatgaattacctcatattagattccatgatttaagacactcacatgttactttacttataaattctaaagtacctataaaggttatatccgagagagtaggacactcaaatataagtactactctaagcgtttattctcatgtacttaaagaaatggataaagaggcttctgacaaaatttctgaaagtttatttaatgctaattaatattaatttatcttagctttaaattagcttagcttattgagatagattcattaatattaaatgtatctatctcaaattaataactacttaaataatctgttttattttaatttatcgcctcagttattatacttttttatgaaaaattatactttacaataaaaaagatatttccttatagaaagtatctttttaaatactattttattatatacttgctaacattggaatatctaacatcttcttcattacatcatctactttttttgctttatattcattgtatccaattaaatatcctttttcatatgaactttttaaaatctctttttcatataaattatcagatttggcttctgtgacacttaaattataaagccctttacacccatcttcataacctttattataccctttttctgcaaaatagtttttatgatttttttcgttatgtactgaagatattgttactccagaattttcttttgtactagcataaggacaaaaacctttatttggttgatgtgctgaatgtcctccacaataataacgtgttaactctgatttatttttattatgatgacctcctgatgaattatgccctcctgagtgagcatatgaaaaattccctacactaatcatagctaaactcaatactacagctactaaccttttcttaaccataatctattccccccaaaatgttatatatttttattatatcatctactatattatatttaaattcttaatatacaaaatattactcgattctgctaataaacatatttaaacaacataaaaaacctcctaatatttgattaaaaatttacacactcatgcatagcatgtatcaaatattaaaaggttttatactaataattatttatcttttccatacattttagctaattggtcttgtatctctttactttctaaatactcatcaaagtccatttttctatccattattccatttggagttatctctataattctatttgctatagtagatataaattcatggtcatgagaagtaaataaaagcactcctgggaacttttcaagtcctttatttacagaagttatactttctaggtctaagtggttagtagggtcatctaatacaagtacatttgcatttgaaagcattagcttactaagcatacatctaaccttttctcctccagatataacttgagcttcttttaatgcttcttcacctgagaataacattctacctaaaaatcctcttataaaactttcacttttttcttcagagaactgtctaagccagtcaaccaaagaatattctactccgtcaaaaaacttattatgattttttggaagataatcttgagaagtagttactccccatttatactctccactgtctggttcaagttctcccataactatgttgaaaagtgcagtagtagctatttcatctcccataaatactactttatcatctctatccaatctaaatgacacattatcaagaaccttaaccccatctatagttttagttaaattgtgtacttctaaaacttcattcccaatttctcttgcaggtgtaaatcctacatatggatatcttcttcttgatggttgtatatcttcaacttctaatttctctaactgtttctttcttgatgttgcttgtttagcctttgaagcattagaactaaatctagctataaattcctttaattgagctatcttttcttcagtctttttattttggtccttagccagttgtaaagccaattgacttgactcataccagaaatcatagtttccaacgtacatttgtattttaccaaaatctacgtcaactatattagtacatatttgatttaggaaatgtctatcatgtgatactattataactatagactcttctaaatccattataaaattatttaaccagtttattgatttaaaatctaagtggtttgtaggttcgtccattaatagtatttcaggcttaccaaaaagtgattgtgctaacaataccttaaccttttccccaccaactagttccttcatttgtttgtaatgcatatctttcgttatgccaagacccataagtattttctcagcattagtttctgcatcccatccgtcaagctctgcaaactcaccttcaagttcggcagcttttatcccatcttcttcattaaagtcttccttcatatacaatgcatctttttctttcattatgttccaaagtctctcatgacctcttataacaacatttaaaacagtttcttcttcatattcaaagtggtcctgttttaaaactgacattctttctttatcagttatagatatactacctgtattaggctctatttctcctgataatatttttaaaaaagtagattttcccgcaccattagctcctattattccatagcaattacctttagtgaattttaagttaacatctttaaatagttccttatcaccaaatctaagtccaacacctgtaacttgtaacattaatatattttcctttctttttgctcataatttattttatcataaaactttgataacatttttattatatattatcacgtaaatagtatattttttatactaaatttgtgaaatatttattaaaataatactaaaaattgtaaatttataaaaattaacaatctcttatattatacttataaagaaatcaaattgcaactttattcattcttttacacattgaaaataagttattataatttctaaataaatatgcttttcttaaaacatcattctagctgttttgtttcatatttaaaaagagtacttaatttgtaaatactcttttttaataactttatattttagcaaaattacatgcaggataagtacatacatcacagttcatacaaaggccaccatgaccatatctagctatatcatacttatcaagcttttcatcaattaaaaccctagataaaactatatcaaatactgtagttttatgatacattgcgcatcctggtatacccataattggaacttctccataataagcaagtaaaaacatagctcctggtaatattggtgaaccatatgtcactaaatcagctccagtttcttttatagctgttggcgtaacatcatctgggtctacactcatcccgccagtacaacagataagttctgctccttgacttataaattcttttattgcactctttataatttctttatcatctgggcatatagtctgtcctataacttcacaaccaaagccttttactttttcttctattactggtccaaatttatcaacaattctgctataaaacacttcatttcctgtagtaacaattcctactttcttaggtttaaaaggtactacatttactatttttctattaccaactactttttttgcatcttctaattttttctcatctataaccaaaggtatcactcttgttccagctacttttaaacctttatttactataaaattattatgaagagtagccatcattatttctccaacacaattcaaatcaaaaagtgcatcaacatctatctttaatagaccatcacatgctgctataaaatctatttttccttcttttatttcactaaaatctaaattttctccagcagttagttcttttaaaaacaatgcgccttcattttcatgaaccattccttctgacttttcccatacatacaaattatctttaccaagagataataacactggaatatcttcttcttttactatgtgaccctttttaaattttcttcctttaaattctccaggtattatttgagttatgtcgtgacataaaacttgtccaacagcatctatagtttttattagcttcataatttacccccgattctctcatagtccatttttgtatcgatatcaaataacatttctttaggaacttctacatactttatttttgatgaattttttaaaatggttttacctttttcatcttctttaagtgccaacaattcttctttcttactatatgggaatatgactggatttccacacatatctttgtatcttggaattactataaaatctctatctaatttaaaagtatttataattttatctatatataagttatcaataaatggctggtctcctacaaagaacatataaccatcacattttgagctatttaaaactcctaattttatagattcactttgacctatatttgcatttttattatctatatattcaaaaccatatttattacacaataacaaaacctcttcatattgacttactactacaacttgatgaaaatcaatcttgctaacttctctaaatacatgttctattatagaacagcctttataatttaataaaagtttatttgctcccattcttctggcaaagcctgatgccattatcactgcatttatcatatatatcatccttggtatttataatatattgatagttctatgatttttataatatctctattgatattatctatatatataatatcatataaactattttaatacttcaatatcttacacaaaatttttgttttacgcttccataaaatatctctatttcactttcatattctttaatattttctattaattttatagctaaatttttatatttttcattttcaactttattaataaataatactctttttccagaataatttttaaataatccatttggatttaatactatattttttaagttttcaatacttactgtagaactactattaatactacttgtatctaaatttgctatttttttaaatatttctactctatgtatattctcttcattaatattcattccaaatgatgttatatctaatatccctatggtttttgtagttttatgatatactactggttctttagcattccaacctttaagtttttttctctttgagccatctccctctattaaaactaaatcaaattggtctacaatttcatccaaaatagaggaatcaatacttactaatttattttcattatttatataactgccacagactgttattccatgacaaatagatggaataacagttccatctattgtaataattatattgtcataatcgtttggtacatatattttagttgttgttgtaagaagaactttcaatttatctctataaaaatttgcaaaatagtttataaacgaagtttttcctcctgctccaactacagttattatttcattcttttctattatatttgatagttccacactttcacctcttataaccagttttctaatctcttaattattatagttagacctttttagtaaaagtgatttttgaaattccataaactcgaaagtaaatagattctgttgtaaacaacaaggcggatccaattcgccgctaagctgtaagcttacgctatcagtttatcttttaaatataattaagatattcttactctctgtggttgctttaatatttgaggattattctgtaaattagataaattaactacttgtgatttttttagtatattaagactcgcatttacatctgcatttataatgattccaacactggatttgtactgtccacgtgttattctttcccctttaaagtcatattttttaacattgtccacattgatatcaggtagaaaatcatcagcaaaaaaatcagacttactagtatagctttcttcttgcctaataaaattgatattttttattttacatagatattctaattttccttttatctctccaaatgggattcttataaaatttctatatatttttctctccatattatcacttttttctaacttagcattatatcctacaattaaatttccaatattattttttacacaataatcaattatataaaaacaggttttatttacatagtctttaacttgattatttctcttattccaaactttaaattgttttcttgttattgcagttatattcttttttaattttaaggattctattttatcattctgtttgtttgcccactgattcacagattttagcctttttccatctatgataaaactatcacctaaattggtaacacatgtacataaattttctaaacccaagtctatagctagtgcatttttttgatttgaaacttcctctgatttcggtatttcataacaatactgaatttcaaagaacctagctttatgtttaggtattattcttatttctttaatttttttctctagtatattttgtggaacttttatacttactttcccatatagttttttaaatgctggagacataggtacatttaaaatcccatcttctttgattcttatttgacctattattatgctaaaaaatccttctttatctaaatatttaggtgattttatccctctaaagtcatatttcccttctttggctaatttaattaacccaaaaaatgacctaaacgaactgtctacttcttttaatatttgttgcgctatattactattgagaagcttatagttctcattttctttgcatacatgataattagcttcatagttaagatgttctccttgattgaaataatgctgtcttacattatatgtaccaacattatataagttcttagctaagaagcacatctctcgtagagcttgatattcttttttagttaagttttttaattgttgtctctgagttccatagtgtatattttttattctgtttgacatgaactcacctcctttagaatatactctactagacattatatacggtatttttacaaaacaccatatataatgtccatttaattactttattttacaaaataatttaaatttacttgcttttatacaccttattatttattataattgtttattattatttttcatacccatataaactttttcaaaagtcataggaagctctcttaaacgaactcctgtagcattaaatattgcatttgctatagctggcgctggtgtatgtataactatttctcctaatgatttagcaccataaggacctcctgggtcgaaattctcagcaaaatctaccaatatatttccaacttctttttttgtaggaactttatactgtaggaaactatctgttaataatctcccatctttatcaaatatagggtcttcatacattgcaaaccctatacccatcatcacaccaccttctacttgtattctagctaaagttggatttataactgttccacaatcaggtacacatgcaaaatttatgaccttatattcgcctgtatttttatctaattctatctctgcaaatcctgctataaatggttttatttttttcaacatgccaaaagattctgttgcttccaaaactactggtacatcatcactagcaaatcctattcctccaacagattctctacccaattcctctaatagaacaaacttgctattatcgtttttaacaaaaaccctgtcttttcccaactctaaatcttcttttttaaatcctagctttgactctgcaactgaaagtaatatatcttttaatttatttgctgtctttattgttgcatttcctgtaaccgttgttgtacaagaagcaaatgctcctgtatcatagggacataaatctgaatcacctgtataaatagaaattctatctacagtagtatttaaagcttccgcagcaatttgagcttgaattgtatcagccccttgacctaagtcagcaagaccagataatagtttatatgtgccatcttcatccattcttatagtgactgttgccatatctacacgcggtataccagaaccatgatttgctactgccatacctactgctcttactttgttgtttcctatatctttacatggatatttatcatcccaattgattaatttcttgcccttttctatacattgtctcagctcacaacttaatatttcgtcttcagctgcttttccattggtatacctatctattatatttttaattctaaattcaagtgggtccattccaatcttatgtgccaattcatcaatagcactatctattgcaaatattccctgtgtagcaccataccctctaagtgctcctgctggtaacctattagtatatactgttctagcattaaatctaacagcatcaatatcattatatattggtaaggtattgtgtccagattcggaagaaacagagacaccattcccaccataagcacctgtattgtttaatgactttagctctattgcttttaaatttccttctttatctgcaccaactttaacatcaaaaaacatttcatgtctactattagaacctacaaaagtttcacttcttgtaaatacaaattttgctggtctaccagttttcatagtaacaaatgcagtaaatatatctgttgctgctatattctttcctccaaatccaccacctattctaggtttaattactcttatttttgaagatggtatacccaatacttttctaattattctctttacattgtgtggtgattgtaatgatgaaactacaacaattctatcatttatatctttatatgaatatgacctatgagtttccatcatgcaatgcgattgactttgggttttgtatgaagattcagccacaaaatcactttctttaagcttagcttcaacatctccaaattcaaaaaattcttttgatactatattattttttgcatccaatccaaaagggtatggctctactatgtctttttctggatgtataacaacttcatttccttctgcttctcttgcatcaaacacaggctttaaaacctcataatctacctttatcatttttaaggctttaagtgctgttttctcatcttcagcagccactaaagctacttcatctccaataaatctaactgtatcttcaagtaaaactctatcataaggtgatgcttctggttctgtttgacctggcacacaatatctgacctgtggtacatctttatacgtataaatacccacaacccctggaattttttcggcttttgatgtatctatattctttatcttagcatgagcatgtggacttctaagtagttttaatgtcaaaacatctttatgcataatgaggtcttcagtatatagaggttttcctgtgacaattgctgtactatctatctttcttatccccttattaatcattatacattccctcctcaatagcattatacatccttttaactaatgcacttgccatatcctttctgtactctttactagctctcatattacttccataagtaagttccttactagcaacaatagatgccttatctatatctttttctttatttaatatattactcgcttcaagtgctaatctagctttttgaggtcttgccccaattgctattttgtaagtatcattttcttttagcattgctgaatttaatacagaaaaatctcctgtgcattttcttattgagtcaaaaacagctatcgcatctttttttggtagtattacttcgaccaatatatccctacttaattcactatccaaaaactcacttaactctagtattcctttattgtataatctcaccttcgctccaacaaccaaaagcgctggtattaagtcagaaaagccatactttgaaaatacacttgcaccaattctagccccttgtctaaattgaacaccaactatattagaaacagcgcttgaaagtattccactacagtaattttttatagttttatcaatttctaaacttctaagtgaagtatctgcacctatcaaaatatttttttcatcctcttttatataatttagatttatatcttttaaatctatcgctgttcctatatttttattacttaattttataaatccacatccacctaaaataacattattttttttagaaattaaaattttatatgcttcttctaaactctgtggaattgaatattcctttatagtaaccatcttatcccccatcattaacttattaaaacacaaaagtttttaataaatcttttatttatatttataattgtagtatatttaattcacatatattaaacctttacattataaacttttatttttatcctcaaccttatcacttttatttccaggaaattttaccatatataaagcttgaattattatggctaccattgctcctgaaactacacttgaatctgcaagtaatgtctctataaattttggaaatttttcaagaacttgaggagctaccatgaatccaataccagaagccatagaaagacctaatatcatgctattttcttgattaaatccatccatactaacaagtcttaaaccagatgttgtaagagttgaaaatataacgagtgttgctcctccaaccacacagggaggaattgttcttattaaattagctaataaaggcgatattcctgccaaaaataatccaattcctccaatagctagtacaaatttacttacaacctttgtattggaaacgattgcagaattttgtccaaacatccccattggagttgcagaaaataatgcacctattgtagagagtactccatttcctaaaacagcagaagaaagttcttcatctgttacttgtctattaagccctcctaccgcagaaagtgtacaagcacccattatatcagctatctcaactaaatatattattgaaaacattacaacaacttcaagtcttatatctagcccaaaagcaagtggttttggaagcgcaaccaaagtaaactcctgaattgaagaaaaatttactatacccaaaattaatgataaaatgtatccaaaaattatgctaactaatattgatgcatctttaaataatccttttccatacttatttaatcctaatatcataagagatacagatattccaactataaaattaattggattcccaaaagtctcattgcccatacccccagctaagttttttatagctattggaaaaagtccaagacccatacatgcaactattgttcctgatacagctggagtaaatataaatcgtatttttttaagaccaaaaccaattataattattactataccagctattatttgagagccaaataatactggtagtccatacttacttgcaacagataccccagctcctataaacatagctgtagctcccattataactggtattcctcctcctaatttaaaacctttaaacaaaggtattggatataattgtaataaagttgataatcctgcaaaaactaatgcggcttgaatcaataatgttgacatcttatgattaagtccagatgcatttgcaatcaatatcgctggtaaacaactacctattaccattgccattaagtgttgtaaccctaaaggtattgcttcctttagtggtggtattccgtctaattcaaattttgatgtactttttgctttcataataaaaactcccgttacataaaacttattgaattatataaatacttaaaaatctaatatattaaattaatgatgttcataaatatcaactatactccaacatatatttaagtttttagtcttaaaaaacagatgcaataaatttaattattaacaaatacacgtattctttaattttgtatacattatataccatgctttacaaatataagagtattatagctatgaatttttaattttttatagtaaatttaattcaatttaaatctttcaatcttaatcattataagttataagttttcataagtatttacatgtttcaagttttaaacatttacctataaacgctactttatagatgtcacttcaaatctagtgacctcatactttcatatgagcgtagactatttcttcatcttcagcattacctgctaagagcaacccgtttccactatcaatcgcttatagtgtactctctctcgagatagtcgtttgaccttcctatttctaggcttggcgaccaaatgtccatttttaagtacttaggctctcaccatataccatcctcactattgtttctggttttcaccacattcataaaagtttctttctatcttttattgtagttgcaaggctttaggatttactggttttaaagttgtgtcctacatagatttctctatgtacggggccaaaagtacaatttatttaacatactttgctttaccccctgtaaataatattatttactctttcactgtttttgttattaaattaattaaatatcaattaatctaagcataaaataattatttaatttaaactcaaaatatttatgaatattttataatataattctcataagacagaaaaacttaataagctatgtatctcagttgtaccaatgtactctcctttactatatttgtatctgcaacataaaatatacaagtttctatctatttatagatatatatatctataagcaaaatagtaatattatttttatagtaaaaattttattcatattactatttataatttttatagagcaattttagtgccaatatttgcatacatttgtatagtataaaatttttatgttctcattgataaaattttacttatttcaagcgttttattcgattttatcatctaaattttaggttttatttttataaattaattgtatttacataaaaaaaaagacctaaaaacaaatttttaacggtcttttctcaattttttattttcatttctaaaatttataataaatagtaagaacactataaattcttttatataaaattcttagtttgtggatgataaattagtgaattaaaatactactttactgattttagtttgacaatatcactccaatttttactagtggctaactctactaaatttaagtctcttcttatttcagctatatcctcttttatagaattagtgtcaccttttatatatgctatgttatgttctatattatcatgagtagctttatttatttcagaattatgtaataaacttcctaaaatattattctgttctatctgtatctctttcattgatttatcttcacattctagactatcaatcttaatttcaattccatataatttttcatttgctatggatacctcgtccttaattccattcatatcttcattaatgttatttattttattttgcataaagtttacttctgatttaacttcggaaacatcttctttcattacagttatttcttgtcttacttctgacatgtcttttttcattacatttatctcttgttttacctctgatgtatcttctttcattacagtcatttcttgtcttacttcagacatatcttctttcattatatttatctcttgtcttacttcggacatatcttcttttaatacatttatctcctgttttacttccgacatatcttctttcattacagtcatttcttgtcttacttcggatatatcctctttcattatatttatctcttgtcttacctctgacatatcttctttcattacagtcatttcctgttttacttccgacatatcttctttcattacagtcatttcctgttttacttccgacatatcttctttcattacaatcatttcctgttttacttccgacatatcttcttttaatacatttatttcctgttttacttccgacatatcttctttcattacagtcatttcttgttttacttccgacatatctccttttaatacatttatctcctgttttacttccgacatatcttctttcattacagtcatttcttgttttacttctgatatatcttctttcattacagtcatttcttgttttacttccgacatatcattttttatgctaactacatcttcatttatagtatataataactctaaaatcttctcttgcacttgcatcaccatccctattaattattataacattttacacaaatgctatacaatgttaacatatatatcagaattattaaaattttaattaaacaaaattgattcactttattacttcaaaactaattaatatctaaaataactacaaataaacaaaaataaggtcaacaacaaaaaaggcttatctctttgagatagcctttcttatttttatttaaaactttgttttttataaaataatctatacattcagctctgaacatgaaatttttcttccaagtgcttttggtttacaaactgatatacaaagtccacaatatctacactcttcttcattcaattccatcttatcattcaattttctcgcttgatatgcacaaactctctcgcacatcttacatttagtacatttttcttcatcataagtaaactcaaagctaagtctttcattaacatctcccatatgattatgtactataccacaagcattttctatagtattatatcctaatctattaagattagattttaaatcatcatgtattttagatattacttgtgcgccttttaaaattactactgaacatataccaacaaagtcagcacctgccataatcatttctaaggcatcatctccacttacacatccacctaagccaattattggtatattaacttgtttttttatttcatatattctctgtaaagttattggcttaatagtttctccacttaaatatcctattccatttccacctaataaaggttgccctgtttctatgtctattctaaatgctggtcctacagagtcacaagcagttattgcatctgctcctgcttcttctaattttttagcaaaatcgcctatctcatctatcataggaggaagtttaactattacaggtatatttactctttcctttgcatctttaagcattggtatcaaatctctatagtcataagatactaattcaataaagtcagctcctgcatttgcaactttctctactaattcgctactttcttcaattgtatgacctactgaagctatacagacagtcccatctcttttcatttgtggtatttcaaaatctatccattgctctggctcaaaatctgtccatttttcattatttaaaagagcattagctgtatttctaaccatatgtggtgctggatttatagctctttcttttcttatagtcttagtcacaactgcccctgctcctgcatcacttaatatcttgcatccagctgcactatatgttaatggtcctgaacctattataagtggtgattttaattctttacctaaaaaattatacattatctgcttccccttttcatatatatttacattcgttaaaatttccaaaattcacaagcaacttctttcatttctttaacaatagcttttttatctaaatcaactaactgtttttcttttaaaatatgtctaccatctatgtatacatttgatataaattcttttttaccctgaactactatctggtcaaatatattatcaagagtcacaggagttttaaattcatcttccataactattatatcagccttattaccaactgctattttaccagaattttgaagtcctaatacataagcaccatgctctgttgccatcctaaatactaaatttgctggcattactgatgcatcttcttcaactgatttatgcattaaaaatgcacctctcataacttcaaaaaaatcatttatatatccatcagtacccagtgccacttttatgccttttttaatcatttttggtactggagaaaaacctccacctacttcacagttgctaagaggcatatgaaccacttttacacctttttcttttaatatatctatttcttcatcatttacttttacacactgagatgctaatacagtttcatccaatatatctaaatcattatagtagtcaactgcttttttgccaaaatgtttttcagcatagtttggctcatatatactctcacataaatgaaattgcattggtgcatttaatttttttgcatcttctttagctttcttaataaatctatcagaacatgtgaagcttgtatgtgtacacattattccatttattaatttactattttctctactccactttattaaattagaattttcatctaaacatctaagtccattttcaaagcttattctttcacaactttctaaggataaaatcgctttcatgcctatttcttctagtatttttccttgctcaattaaagttccttcttctgtatttggagcttctagggtatcacaaaaagctaccacaccagattctataagttctattgctgatgctttagttgttgccttcacttctttcaatccaattctattttctataaatggccaccaatagtcatttaaaaaaccttcaaagtcagtaaaatgtacatttgccggtattcccctagaaagaactccatattgatgcatatgaccattgacgaatcctggcattattatagcatctgatttatctattatttcttcaatatttttatattttatttcaacttcttcatttggcaatatatcttttataatgtcattttctactacagcagcagaatttgtatatatttcatcagcagaagatattaagtatttacttttaatagcaatcatttatttacctccctgatttaattttttcatggccatataaactttctcagaagttataggaagttctcttatacgaactcctgtggcattgtatattgcatttgctattgctggtgcaggtgtatgaataactatttctcctaaagatttagctccatatggacctgttggctcataattatctacaaaatcaacaattatgtttcctatatctttttttgttggaactttgtattgtaatagattagaagtttgaagctttccatcagaaccatgtctagggtcttcatacattgcaagccctataccttgagttacaccaccttcaacttgtattctagcaagtgcaggattcataactgtaccacaatctgtagaacaagcataatttattactttaaactcccctgttgttttatctaactctatttcagcaaatcctgctaagaatggtttagcactctcttgtataccataagattcagatgaatataaaacttcttgatttccaccaccaacagattcttttcctaattcacttaacaaaacaaacttctctacatcttcactataacaaactctgtcttcatatagtattaaatcatctattggtaaatcgagtttcttctgtgctacttttaatatcttttgttttaaactttcagcagattttattgtagcatttccagttacataagtagtacaagaagcgtatgcaccagtatcatatggacacatatctgtatctcctgtataaacggaaattctatcaatagatgtattcaatgcttttgcagctatttgtgcaagtattgtgtcagaaccagttcctaagtctgaagacccagaaaacaacttataagttccatcttcatccatcctcatatttactattgccatgtctatgttggctataccagaaccatgagttcccacagacattccaacagccctcaccttattgtttccaatatccctaacagggtacttttcatcccatccaataagttttttacctctaattatacattcatcaagtgcacaacttcttattggaaaattcattattccgccttcagtttgtttttttataatattctttaactttatttctgttgggtccatattaagtttatgcgctaattcatcaattgcacaatcaagtgcaaatgtaccttgtgttgctccatatcctcttaatgctcctcctggaactaaattagtatatacagttctcccatcaaattttattgcaggtacattattatatgttggaagtacattatgacctgattcagagcaaactgaaggtccattatcaccataagcgcctgtattattcaatgctttcatatctatagcttttatgtttccttctttatctgccccaatttttatatcaaaaaacatctgatgtctagtattagtcattgcaaaagtttcttctctagtataaattagttttgctggtctttttgtcatccaagttacaaatgatgcatatatctctgttacagctatgttttttccaccaaaacctccacctattcttggttttattactctaacttttgaaagaggtattcccagtgctttagaaacctgtcttctcatatgataagctgattggtttgcagaagttactactaatctgccattcgtatctatatacgtataagctctatgagtttccatcatacaatgggcttgtgattgagtcatataagaatgttctactattacatcactttctttaaactctttttctacatcccctttacccattttttctctcgatacaatattttttgtagcatccaatccaaaatcaaatggacaaaacaaatcatcttcttcatggattaaaattttatttccttccgattctcttgcatccaatataggagtcattacttcatattcaacttttataagtttcatagctttaatagcagccctttcatcttcagcggctattatagcaacttcatctcctacatatctaactacgtcttcaagtattaattggtcatgaggtgatgcttctggatatgactctccaaccattgaatatctataatttggaacatctttgtaagtgaatatgtttactacaccttttacctttaatgcattttttgtatctatgttttttatcttcgcaaaagcatgcggacttctaagaagcttaattgttaaaacatctttatgaaaaattaaatcttctgtatatattggttttccagtaacaatggcttcactatctatttttcttacctctttatttaccatcacactcacctccaatactattatacattctcactactaaggcttttgccatatcttttctgtattctttacttcctcttatattacttccaaatgaaagttcttcacttgatacttcaccagctttttctatatcattttctaaacttaatatttcacttgctttataggcaatttttgctcttcttggtctagcgcctatcgcaattttataaatacttccttcttttaacattgctccatttaatactgcaaaatcacctgtacattttcttatagaatcaaatacacctatagcatcttttttaggtaatataacttctattaatatatctttttcaagctcactttctaaaaaatcagctaagttcataaccccttttttatataacttaacctttgcatctaccactagtaatgaaggtattaaatctgaaaatccatacttagcaaatacgctagctcctactctggctccacttctaaattgaactcctactatattagaaacagcgtttgaaattaccccattacagtaatttttaataaccttatttaattctaaagttcttaaacttgtgtctgctccaattaatatgctatcatcagtttcatttatataatctaaagctaagtcttttaaatctattgctgagccaatatttttactacctagttttaaaaatccacatcctccaagtattatgttgttttttcttgatattagcagttcataagcttcatctaaactttttggaactacatattcctttatagttatcatactctctccccatatcaacttaattttcacttaaaagtctaagtgtttaaatatttatgtattgctcttaattgacctttatatcctgtacatctacaaaggttaccatttacataatctataacttcttcttctgttggattttgaagctctcttttcattgccaaaaccatcattataaatccaggagcacaaaatccacactggtcagccccttcgtctgcaagaaaatctccaaacttctttgcttcatccaagaccccctcaagtgttgtaatatgctgaccatctactctagcagtaagataattacatgaaagcacggccttgtcatttaccatcactgtacataacccacatgagcctgtatcacacccttttttaacacttacatatccattttctcttaatgtatctgctaaaaaatcatctggtcttatacttaattctttttctttattatttatggtacatttgataatcaaataaatcacctcaaaactcatatttttaagctaaagttttactatacttttctatgaataaattacatttattaataaaggctattccatttatgaccttccattctattttttatagttcctcttacacaaagtctctcagctgtatcttgagcatcttttaatgctttctcttcattagctgtcaatatttttgaatcttccattattatatttccatctactataacactctctatatttttcatactagaagaatatactaatgtagataccggattatgcataggtatcgcttttggtgaaagcattggattaaatattagtaagtctgcttttttacctatctccaatgaacctatctcatcttccattccaatagctcttgctccatctatagttgccaactcaagaactttttctgccgacattgctaatgggtcacacttattaactttatgttgaagtgctgttaatttcataagttcaagcatatcttgagagttattactagcggctccatctactcctaaactaactgttattccttttttaagcatttctggcactggtgcaacacctgaagataagtacatattacttgctgtattatgagacactttcatatcgtattttttagtaagttccatatctttttcagttagatacacacaatgtaccataagcacatttggtccaagtattcctaatttttctaaaacatctatgtcatattgcccatgcaattcttttgctgcttctctatcaaaaggagtctctgatatatgtactgtaaataaagcatcatcatattcttttaccactctccatagcatttcaagcatttcttgagaatttgaccatattgctgcaggagctactcctattttgattcttccattttctgtattatggtgtttttcaaacaatcttcttacatctttttcaaccgtttctacatcttgcattattccaggatgaactccaaattgagctcctgtattcatacatcctcttccaagtattcctcttattcctaattctttataagcatctattattccatcacaaagacctggcttactatgaggatacatgtagtcaaccatggtcgttataccacttctaagtccttcaatacatccaagcattgcagcatcataagtatcttttggctctaaatagttagctgctggaaatgtcatagtttctaaccagtctttaagtaccatatcatctcccaatccttttaataaagtttggaataaatgattatgtgtatttataaaacctgggaataaaactttacctttagcatctataatttttttaacatcagtatatttactttctatctctttagaatttccaatatcagcaatcttgttatcttttactactaatgccccatcaaaaataacttctctctctttattcacagttactattatggcattcttaataagtatatccatcattcttatttccccccgcattatttagtaatttttcttttaatatattgacctgttggatgttctttaacattacaactttgtactacatgatttcctctcaaaaatacatcttcaactttacatttaaccttaaatccttcatatggagtataatctacattttgtttttgagttttataactaattgtttcttctttattgatatttaaaatgactatatctgcatcacttcctacagctatctcaccttttttaggatacattccaaatatttttgcagcattcgtagaagtaacttccacaaacttatttacacttattctattttctaagaccccatatgtatataaaagtgctaacctatgttcaacaccaggtgctccatttggtatcttactaaaatcatcaattcccaagtctttttgccccttaaaattaaatgaacagtggtctgtgccaactgtttgaatatctccactagacaatccttcccaaaggtaatttatgtcttctttttttcttaaaggaggagacattacatacttagcaccctcaaatttattcttattatataaattgtcttctaataatagatactgtgggcatgtttctactatcatatctatatttttttctctagccatttttacagtttcaagtgactccctacaacttaagtggactacataggattttgaattagataatttagttatatcagcaagtcttgaaacagactctttctcaactatgttaggtcttgtaagtggatgatattttggctctaaattaccattttgtatattttcttctatcaatacatctagtaaatccccattttcacaatgaaatccaactatacaacctaaatcccttgctttctttaaaaccctgtatattgttccatcatctactttcatgccatcatatgccatatacatcttaaaagatactatcccatccgaaataagtttttccatatgattaaatgtatctttatttaaacatgtaattgtcatatgaaaaccataatcacaataacaatttccacttgcttttttatgatatgcttctacaccttgcagtaggttttccccctcattggcttctgcaaaatctagtattgtagtagttcctccagctatagctgctcttgttcctgtttcaaaattatctgcagttgtaatagaacctgcattcatatcaaaatgagtatgtgtgtctattccaccaggaattacaattttacctgtagcatcaataaccttatcaccatttatttctaagttatttcctatttcaactatcttttcatcttctatccttaaatcacttatataagtcttatcagaggtaattatagttccacctcttagtattgttcccatatatacctcctaacttttaagctttaaagtattttctaagtatcgtaaaactttatttaaaattgtattttctaaaggtgctatattcagcacctctagactatatttaaataatttattgtgaactaaatattattttccgtatacagattttaatattccatagtaaccttctgttcctataaataactgttcttgctctatatactcatctattgtgtgagcaagattttccttagaaggaccaaatcctatagtttttattccagcttcacctgcatagtgacttccattcgtacagaatgagtattgagttatttctgaatctattccagcttcttttaatcccttatatgctgcttgaacaaattcatcttcttcgtcatataaccaacctgggaagaatctttcactttctatagtatttcctgtatagcaatcagctttttcaaccgcataagaaactttcgcatttaattctgggtcttctttcatcatttcatctaataaagcttgtattggagctaatacgccttctcttgtttctccaactaataatcttctatcaaaagtagctttgcaataatctggcactactgatgcccctggatatggagaagattttatatctgttaaaactaatattccatcacctaaaactggatgagttggaggtactaattgttgtatcttttggattacattagccattttataaactgcatttacacctttttctggattagcagagtgagctggtttaccaaaagtttctactactatttctcctctacctctctgaccaatctttaagtttaactctgaagactcacctattacaacatagtcaggttgaacagccttacttatctctctagccgaaacaccttcaaatatttcttcatgaacaacacctgctacatatagttctccagcaaaatctcgattagtgtctttagcaaaatacgctacagcagacatcattgcagtatattgacctttcatgtcagaagttcctctaccatatatctttccatcaactatttttccttcaaaaggaggaacactccatttacttgcatctggaactggaactgtatctatatgtccatcaaataatattttcttacctggcttgttaccttttatacatcctactatatttccatatctatctcttgaccaactatcaaaacctaatttttcaaaagactcttctattgcttttacaacaccttcttcatttccagaagaactaggattttgaattaatttttggcatatttcagttacttcttgttttctttgttcgtttaacatttcattatccccctagattttttataatgtatgtattttatatacttatatattttctaaattttagaacttatatatcttctaaatatgtaaaccaatatctaataattgcattttagtaattccttatatacttggatattctccatcccaaactatacttctatatttgtcagggtcagtatctccttctgtgcttattaaaagtattcttgaattttcatctaattttaaatcttttcttaaatctgctaaatcttctctttccatagctgctactaaaagaccagttgtaactgctccagattctccagaaattaccttttcatcaccatttaaaggattacctaatgttctcatacctttagcagaaacccagtctggtgctgaaacaaatgctgcagcatgattttttaatacttcaaatcctatagtatttggttctccacaagcaagaccagccattatagttggcatatctcctccaacaaatcttggttttccatctcctgcttctgctgatttatagtagcaatcagcttcatcagcttctactactactgttattgggcattcatcgtatattgaagcaacatatccttgaactgctccagcaagtgaaccaacccctgcttgcacaaatacatgtgttggtctatctactccatattcttttaattgctctatcgcttcttgagccatagttccatatccttgcattatccatgctggaatttcttcatatccatcccatgctgtatcttgaaccattactccatgatcatcagcttctgcataatcattagctaatcttactgcatcatcatagtttaagtctgttatactagcatctgctccttctcctttaattttatttaatctaaactcagaagaaccttttggcattaatacaacagatttttgacctaatttattagctgtccaagcaactcctctaccgtgatttccatctgtagctgtaaagaaagttatttctcctaatttttcttttatttctttcgaagttaatttgtcataccctaactcagatatatctgtatctaatctttgagctaagtatctacccatagaataagaaccacctaatactttaaatgcatttaatccaaatctataagattcatcttttacatatactcctgcaacacctaatttttttgctaaaccttctaggtttgctaatggagtttctttatattgaggaaagcttttgtgaaaatttctaaccttagttatttcttcttcatttaaaaatttgatacaattttccttatcaccctttggcaaattatttactttccatttaatttcttttaacatctaaaatacctccaaattattgttaaatttttatactttaatatataagcaattaacatgccaacactaaatatatactagatatttttctatgactctttagtatagaaattgcaatgcttttattattctttcttttctatctttagttcatacaatgtatgtagaatttaataactaaaaaaccttttctatcttctcactttttaattctcatttttaaaatttaaaaataaatctcaaaacactttgtttctatattttttaatataaaatttataaaatctaaattaaaacataaaatagtgatgcaataatctattacatcactatttgtatatatttaataatataataaatctttagtggtctctaagaggtgatttttcatcttttttaacatctaattcttcttttacgacattccatttttcaagaccaaacttagaaaccataactgcctctgcagcaccttttccaagtctttttactgtgtccatacctgtctcatcctcttgggcaccttttgcttttccatctttactccatattgtaccacctatatagcatccacctaaacctccagatactaacatttcatgcattaggaagaaatttattataggaagttttgtcaattcttggccaccatatctagttccaccagtagttatagctgcaccaaccttattttgaagttttcctggatgaactaaatacattggacgaagtctattaaatactgctgtaagttgagcagttatattcatatcataaactggagaacctactataattccatctgcctccaatattttttgctctaattcttggatatcatcttttataatacacatagtttcttttcttatacatgcatcacaatgtacacaaggacttatttttttccctctaactgaccaatactcagtttctataccaggtatagtttctgcttctttcaaagcttctaacactgcatattctgttgctcctttacgtggacttccacaaatacctaatatctttgccataataatatctcctcaccaaataaatctatttttattatctatttacaaatacaataaattgttgtttgtgctttaatttctactattttaattttattggcaatgaatgtatttctacatcagttgcattatatactgcatttgcaacagctggcgcaactggtacaacagcacattctccaatactcttaccaccaaaaggtccagctttttcataactatttacaaatgcaacttgacattttggcatatctacagttctaaataatttatatgttttaaaatcagtagctttaggtctaccttgttcatcaaatgccaattcttcactcaatgcgtatcctagacccatatgaatcccaccttctaattgaccttctaaatttaaaggatttataactctaccaacatcatgtacagctacaaaatcaactacttttatatccttagtttctttatctactaaaacttcagcaaaatgtacaccataagaagtaagtccagctggtgaagaataatcttcaacaacagttaactctcttaatgatttactttgactatatactgcgacatcagaaagtgatgcttttacattttcatcaagtttactaattacatatccattgtctagatataaatcttcttttgatgtttcaagtaatttttctgcttcttctactataaggtttttcaatttctctgctgtctttttagctcctccaccttctacaaatacccctctacttgcatagtcaccaaggttgaatgtacatgcatccgtatcagtttcaaatgtatcaactttatcaggtgttattcctaaaacttcagctaccatcattgtttgcatagttacgacaccattacccatatcatgtgctcctgttagtagtgtcaatgtaccatcttcatttaatttaagagtcaatgtaacaacatctctatgtgcaccaaaaactccattaccatgtgcacctattgccatacctatacctcttaaatattttccttcttcttttggaagttttttcttttcatcccacttaaacatcttcttaccttgctctatacaatccaatactctaggatttccaagagaaccgcggaagattatatcgacatcatctggctctactgcatttttattttgaaaatcgactaaatccatacctatttccttggctattttcgcaaattgagcctgttgagccataaatatttgaggtgacccatagcctctcatagctcctgctattggtgtatttgtatatacaggcatcccagtaaactttatatttggtattttataaactttaaatactttatgactaagtgctcctataacatttaaagcacttgatgcatatgctcctgtatttgtatatatttttatatcttgtgctattacttcaccatctttatttacaccagtttttaattttacaaaagacccatgacgagttcttgttgatatcatagattcctttcttgtaagaaccattttaactggtcttcttgtcatttttgataatgcggctgctactggttcaattgtaagttctaattttccaccaaatgagcctccaatagcaggtcttataactcttactttatttaatgacatcccaaaaatttgagatagtattattctaaatccaaatgtattttggcaaggtgtatgtacagttaatttatcattataatcatagtgtgcaattacactatgagtctctattgcactatgatgtattgctggagtagagtattcatcttcaaatatatagtcacattccttgaagcctttttctacatctcccccatttatgttgttttgagaaactatatttgaatctccatgtatgcagatagcatcttcttttattgcatcttgtatagtaaatacagctggcaattcttcatattcaacttttataagttttacagctttctctgctatttctggagtctctgcagctactgctgcaacacggtcaccaacaaatctaactgtatctgaaaatataacttcattttcaggtatattgtgctcataaaatcttaatgaaccattgtattttctttgtgatgtattgagataagtagctatagctctaacacctactactttctcagcttcacttgtatctatactttttatttttgcatgtgctacaggacttaaaagcatcttagcgtaaagtacattttgtggtttcatatcagccacgtatttcatttgaccagtaacttttaaagctgcatcttttagagggtatgattttcctattaccttttccataattatctaccccctaatctagctgcagataattttacagcttctataatctttacatatcctgtgcatctacagagattttctttaaaagcttctttaatttcatcttcattaggagatgcatttctatttaaaagagcttgtgttgttataatcataccaggagtacaatatccacattgtacagctccaacttctataaaagcttcttgtattggatgaagattttctccattagcaaaactttctatagtgtatataactttaccttcgcagttttttgcaagaagtttacaagatttcatgtcaactccatctatcaaaactttacatgctccacaactgccactattacaaccttgtttcgctccagttagatttaatttttcacgaagtacatgcaaaagagtttcattcttttcaacttctatttcatacatgtaatcattaatatttaattttattttttccattttctcctcctacagataaactaatgttgtaatagaatattattacaatcttattttaatattagtataagctattccacttatgtccttccattctattagttacattagctctcttacataattcttctgctgcaagttgtgcattaagcaacacttgttcttcactttcaattgtagttacttttccattttcaagtattacatttccatcaactaaaacactctctacattgtgcatactagctgagtataccaaagttgatacaggattgtgaagaggtattgattttggagaaagcattgagttaaatattactaggtcagcttttttcccaatctccaaagaacctatttcatcttccattctaagagttcttgctccctcaattgtagccatttcaagaactttctctgcagaaattgccagagggtcacaattatttactttgtgttgtaaagctgttaatttcataagctctaccatatcttgtgcgttattacttgctgcaccgtcaagacctaaactcacatttatacctttttttaacatttctggcacaggtgcaacaccagaagcaagatacatattacttgctacattatgagaaacttttatgtcatactttttaagcatttccatgtcttcatcagttatacatacacaatgtactgctacaacttctggacctactataccccatttttcaagtaattttatatctatttctccatgtatatcctttgttgctgttcttgcaaattctgtttcagatatatgaactgtaaaatatgaatcatattctttaactatattccaaagcatcttacccatttcttcagatatagcccacattgaagaaggagctacacagatttttattcttccattttctgaattatgatatttttcgaatacccttctcaaatctttttcaaccgtttccacatcttctataagctctttgtgaatacctaaatctatacaacctctacctacaacccctcttatacctaaatctttatatgcctttactattccatctgtaagtcctggtctattgtgagtatgcatataatcaaccattgtagttataccactttttaaaccttccatacatccaagcattgcagcatcataagtatcttgttctgttaagaattttgctgatggaaacatcattgtatttaaccactcatgaagtgccatatcatcacctaaaccttttaataacacttggaacaggtgattatgagtatttataaagccagggaatattacttttccattagcatctataacttttttagcatcaagatacttaggctcaatatcaactgtatttcctatatccaagattctgtcaccttgaatagctattgctccatcaaatataacatctctgtctttattaactgtaacaattattgcattttttattagtatatcaatcatcttaaatccccctttgaatactttcattacaacattttaccatatggttttctcatattatatctaatacatttatccaatattttcctcaagatttgaagtaacgttttcagcacttttacgtgactttaatttaaataatgtttgaagtaatatagctattattgctccagaaactatacttgaccctccaaggacagttccaattgtttctgggaattggtctaaaacttgtggagcagttgtaagacccatacttgttgctatagatacacctgctataagattgttttcttcagtgaatccatccatactcataatagagaaaccagacattgctattgatgagaaaactactaaagttgctccaccaacaacacaagatggtatagttgtcattattgcacccaatgctggagatatccctgctagtaataatacaagtgcccctagtgctattacaaatctacttgtaactttgttcatagatacaattactgtattttggctaaatactccagttggaagagctgcaaatagtgatgaaattatagaagttatagaatttcctaaaacaactgatgctaattcttcgtcagttacctctctatccattgctcctactgtagctattgtacaggcacccatcatatcagctatacctattatgtaaataatagtaaacattactattaactctggtctaaattctaatccaaaagctgctggtgttggtaaagatactatagctgctccttgaacggctgagaaatcaaccaatcctaaaactaaagatatagcataacctactaatattcctattaatattgaagaattttttactaaacctttaccgtatttatttatcattattattacaaaagcaactataactcctactgtgaagtttattgggcttccaaatgtttgtgtgccttctcctccagctaaattctttatagctgttgcgaatagtccaagtcccatacatgctattatagttccagaaactattggagtgaatatatgtctaattttcttaactccaaatcctacaaagaatacgattaccccagcagcaatctgtgctccaaatagagctgctaaaccatctttagctgctactgaaagacaagctcctaaaaatacataactcattcccatcattacaggtaatcttgaacctaacttaaatcctttaaataaaggtattggatataactgtaaaaacgttgctaaacctgctgctaacatagaaccctgaatcaacattgttgcttgcccctggttaagtcctaccacgtttgctattaatatcgcaggtaccatatttcctactatcattgctaacagatgttgtaaggccaaaggtattgattcctttagtggtggtatcccatcgacatcatattttgaagtattacgtgttttcataaaataaatcctcccatacataaatatcttgactaaatatttttataattattttctataaatatttttatgaccatgaatttattgctcaaccgataaacacagctaaactgagctatttttataaaaaattaacaaatttctaaatattccctccccgattttcaacttaaatgaaacattaattgcctggtatatatttatttgttaaattttttattaaaatgaatagctatcaaaaataatctaacaatctcatactaaataatttaaacaattcttttaaattattatatcttaattagtctcttccataacagctctttctttagcctcatcctctagacttttatttggtattattagatttaaaacgaatgcaaccaatgttgcaattactattggagattctccaaatactaactttacaaatgaaggaaatgcctcttgggctgctggtactgatgttattcccatgcctaaggcaattgccaaaccaacaatggtaatatttcttgatgacaactcttctgtaataattaactttatacctgtcattgttatcatactaaatatagatattgtagctcctcctaaaacagaatatggtatagtagtcattaatgcaccaaatttaggcacaaaccccgacaataacataaatataccagctattccaagcacaaatctacttattactttgttcatagctaccatccccacgttttggctatatgatgatggtggtaaacctccaaacaaagctcctatcatagtacaaattccacttcctattactccacttgataattccttatctgtgatattcctatccatgcctcccattgtagtagctgataaatctccaattgcttgaacagcattgattatacttacaattactactgagattattacaggcatatcaaattccatcccaaattcaagcggtttaggtatcgcaaaccaagttgcctctctaatagggtcaaaatttattatacccagaactaaagatacacaatatccaactataattcccaaaaatattgctgccaattttgcatatccttttgcaaattgactaagacctataactaccactaatgttatagccgctactgcccagttttgcatagaggcataagtaggactatttacaccacctgccatataatttattgctataggatacaaagataatccaattgtaaaaaccactgttcctgcaactatattcggaaaaaattttcttatcttttttatgaatatccctattaatactgtagccactccccctattaattgtgcacccaaaatgcttgctaatccataatttcctccgactgctacaagtgttggtacataagtaaaaccaactccaaaaattataggcaatcttgaaccaatatttcctattggatatagttgtataagtgttgatataccagctattattaatgcatattgcactaaaagtgttatttgtgtagggctaacacccacagctcctcctacgactataggtactgtaacagttccaactatcattgctagtatatgttgcattgatagtggcaaacactttaaaattggtggccttccatcaatatcaaacatagaaacattcttttgatatttactcaaggttatcactcccaactattttttaatgacagttattattatctcacacaacatcctttctttttttattttgtcatctcaatttaatatgaagcaattataatgccaattttttaacataattgttttacatatataatttttattatatttgttagtatttgataatttattaaagcatttatttttttaaattcttttaaattttttttatttttggataataaaatgctattacacaaaaaaacacttagaaaatagttttccaagtgttttttatcaattttataatttcaaattttagaattgagaataaaaaacctaattattatacatctatttttctgtacaatgtagctagtgatattccaagttttttggcagccagttttttagacttagtatcatttccgtaaaactttaacactttctttatataggctctttcaaactcttcaagtgtaagtatgtcttgttccatacttatctcatagtcactttcctcaagtaactttatatttatattatttaacttaaaatattcaagtatctttctatttattattcctttatgtattattccatcttcctcaagaaggtttaatgccagttctatagtattttccaactctctaatatttcctggccaaggatacttaagcaacatttgttccacatctggttctatatggtacacgtttttcttcatttttctcgaatatttgtctataaaattatttattaatatttgtatatcgtctcctctttctctaagtggaggcacttctaaaggtattacattcaatctatagtataagtcttctctaaatttattttccttaaccaactcaaataaatctctattagtagctgatatgattctaacatctatatcaattagttcatttgaacctattctcgtaaacttcttttcctgtaataccctcaataactttgattgtagttgaattggcatatctcctatctcatctaaaaatacaacccctccattggccaattcaaacttaccaattttaccttttgaatctgctccactaaaagctccttttgtatatccaaaaagttcactttctagtaaaggttctggtatagcagcacagtttatagcaacgaatgttttattccctctgtttcctgcgagatgaatggctcttgctattaattcttttccagtgccactttctccagttatagctacagtagaatcactatttccaattttgcaaattctattcttaagagcacgcattacatcagactctccaattatggagtctactgttgttgttccccaaatattatatacttccattccaccatacattactgaatcactgtgtttgtccataaaatatcaactccaaataagtattctatataataatcattcacattatctatttaattatatcataacagaaaagcttagttataatttaataatattattttaaaacaaaacttaataaaaagtatatctacttagttttaatttgatagatatactttcttcattttacaaaaatcctctattaaataagcaattacaatgccatattttatatgaaaataatttttaaaatttttaatttaagttcttattaaattttttatactactcgtaatttttatacctatataaaattacttttataaattttaaaattcttatttttaaaatttataattaaaaattatcttttttaaatcattttttgtgttttttatatcatctaacctcacagtttttgcttctataaacttacccttaaatgattctgataatttccaggaactataattcttatctttttgaatacaaggatataataatatacatctttttgcattttcatatgctgttatatatgcatacatctggtatatatcacttgacctataaaaaacatttgaatctacttcaatagctttccatttagtgtcaattataatttcatattcattttttaagtcatataaaactatatccggtcttaaattaaagtttttcttacctgtttgttcatttttcaaaagaaatttactcttatcttgtatatatgtttctctaaatgaattgtcccatatacttttgattaaaattcctatatattcttcatacaaagtatttatttcaaataatatagaaaatgcctcttgattattttgactattatccatagatagatttaaaagtagaagtctagctagtaaataacaatctttaaatctatcattgtttttataaaatttataacccaacagtttttttctatctatataaattaaatctacattttgaaaatagcttaaaatttttttaatcttgccttgaattgaattgtcatttattctacataaaatagatatacatgcttttttaagaacttgattcaagaaattattttcactacactcatcatattcacatcttattttcattggagaaatgcctttttcttttgcatatgtacttaataatattttacccctcataacatttaagttctctattttatttatatattcaaaataaataccttttttcatctgtgtttgcatactctcaatgaaatacataacaaaaaaatttaagagattataatttttcaaactcaatcttattttttcattcattgtaattggaattttattacatatagaaagcatctgtaatagtatctctctatcttttacaagattatcacttaatgacaatttaggaagtatttcaagtattacattttcaaaacatatgatgcctacatagtttataaatctaatttttttgtatttaatatctattatattactttttaatacatcattattgttctctagatatttaagcaatttttcatattcaatttctgtaagctcattttcaccattacctacccttatccattcataggtttccttaacatatatatttttactcatatatattttttagctcctcactagatatgttttgttttatacaatagttaactttactctccattattgaggcattattatttttaaataactcagaagctataagtttttctttataaacaatgtatttatctttttcatttcttccaattcctcctaaaatcaaacctactttttctgaatcataataaaaatactcttgaagaagtggtattattttacttctaaatactactactatatcattaatattttctacagcaagtagataagcttgtccaataacatggtctctatcatataaaaactctatccttttattgattgtatatagcatttttctaatatctataccatctacaatagacaataaatcataatctggcataatttcttcaaaattaaaccttcttcttaaagctatatctaaaagtgctattgatttatctgatgtgttcatagttccaactatatacaaatttggaggtagagaaaatttttcctttgaatatggtagtttgacaatagtttgatttgatttagtaagtcttttatcatcttccaataatgttattagctcaccaaatattttagatacattccctctattaatttcatctattattaaaacatagttttctgattcttcaaaattaaaactctcactatattctatattttctaatactaatttctttttcctgtcttttatagtttctaaagtcaagctatctttttccaactcaaagctcatctttttttcaaatttcaatgcattataacatgcttctatagatatatcctttaatatcccatcttctggcttaaaattgccttcaccatcagacttaagaccctctataaattcctcatatccatatgattgatgaaatgtacaaaattctacattgtttttataatctaagtaacctgtatagtatttgtttcttagactggtttcacttactagattgtaaaccatctgttttgtattgtatgttttaccagttcctggtggtccataaagtatagtatttaatggcattttattagtaaatctttttacatacttttcaactatactattattttcaaatataacccatgcatttccgtctatattctcctttccatactctatccatctaacaggaaaaaaatatccaccatccaaagcacttactttctctttatcgaacccttccataacttgacatacgccaaatagactcttcattgtatggtcattttcacaaattactttctcgctattatacaataaaatataatcatctgtctttatattttttaggctttctaattgttctagattaatgggctgaataaataattcttcatcatctacacacttatctacatttttataataatagttttttaaataccatttattattttcactttcttctattctttttctcaataatttcttatcttgtgacttaataatttctaaatatgaactaatatcattattatttaatttataaaattcacttgtatatactttacaatttgaaactgtatcaaaattatgcatccattttactggtagtgtatgccctaaaatatgacttaattcatatccattttcaaaatcttcttcaactatgccaatagacacattacatttaactttttcttctatattttgatatgctttatataaaaaataatctccttttttaatcgacataaacttttttataaaatctttatcattacaattctcattaatatacttttctgattttttccccatactgaatactttttttaaatttatttttatatcaaatccaagtgcaattatgctttcttctataaaaatctgtggtgtgtctgtttcctgataaaaaaattcttccattaaccaatactctgtacctcttatattttcagacatatacactctccttaatatctaaaatatactaattatacaataagcctactctaatatttccatttaaattttcctttatatataaagaaaatattacttcatagctttcttctaccttgctctgaatattacttattaaatcattcaattccattatagaaaattctggacttccttcaacaaatacaattcctttcttacttataaattcctcaccaatatattccatcctgtcaaataaaatgtcagctatctcgctatatgactttgtatcttcaaactcttcaaaagaatacttaattcctttatctcctacaatagcttcttttaaatcagtaatatctatatttatcatgcaagaatcagaaatagactctaccatgatattcattaaatcaacaaatttaaatatactatcattattgattttaaactctctcccaagctctaaatcttctttattttctttctctgaacaatccattcctatagatagaactcttctttcgtttgacatatatgaaacagcttttataatatctctaatatgtttatcttcagatgaatatatcaaaaataatatatctacaccatctaaaagacttctaacatattctttttcaatctcttgatttatgtttattttttctatatccatatttgcttttattttttcttctacttcatttattatattaataccttcaactccaataccaattattttagcattcttattaaaattttccattataacgtatatctccttaataattatttaatttcaacatttctaaatattataccatattttcttcataaaaatatcttaactcattggccttatcataaagtagcttattcaaaaattttggctctataaccttagcattatttccaataaaaaataaaatcgaagcataacaatctatatcttcaacctttatgaatgtactaattattccactaccatcttcatttagctccatatctaaattccaagaactgtcctttattttagaaacaccttctttagttaataatacatttagataaataatttcaccaaattttttagtagttgaactatttccatataaattgttatatacttcatgtaaccattcttccaagtttatatgtatttttttactttctcctgttctttttatatcaattatattatctatatgaactaatattattttatcacttttacaatcatatgctggtgaaaaccatgctcccttatttaaatatatacctatagggcatacgtttttttccaaaatctgattaccacacttatacttaatatttaaaattagagattctgaagaagctctaaaaaactcagttacattactactcttaaaatctccatcattagtatcattagctacaaagccaatgtatcttttaatattttctatacctacttttatactgcttttacgttcataacttacttttctcattatagaattaatttctatttccattaacttataattataaatctgaagtgacttaagtgcaaatagtataatcataacttctttttctgtaaatataacaggaggtatatagctattatttagcaccctataacctccatttctaccttgttctgcttgaattggaagtcccattttatttaattcttttaaatatcgttgtattgttttagctgaaagattaaattcctctgacaactcttttattgtaaacttttgcttatcattaatatatatccaaacatcagtcaatctttttaccttcgacaaataaacacctcttttcactaataatactctcaattaattaaattactatacactatttaaaatttaatattaatgacatttttatattttttcattaaaaagcagaaaaatggtactcctacaattgttactactacaaattctccaaaacctacctgtatcatagatagaattaatggaagcccaaagaatacatttaacattagaccaaccacaatcgaatttataacagttggccataaagaagctataactaaagtacttttattttgtttacctaactttctagtaatataaatcatacttgcacttataaatgtggctaatgttccagaaattatatcaggtacaccatatggtcctattacatttgctaaaaaacaacctaatgtaagacctactatatatcctttatctaaaaatgccaaaagcatcataatctctgctaccctaaattgtattggtccataacttataaatcccaatgataatgttaaaactgcatagattgctgtaattgctgcagttagtgctatattaatactattttttctcatatctgtctcctagtaaaagttttatttctaaaaaaattaataacataactttattttatacaaaatctataaacttaaacagtaattttataaaaacaaattattttagcgaactattttccaaattcattttatattatacaatataatacatacaaattcaattttatatatatagaatatatgatattaaaattatatacaaactaaagataaattttctattgttaattaaaaacagcaaaaaagagccttaaaattaggctctaataatttattttaaaatcagtgaactctactaccatcttttaatttagataatatcatccaagtacctatacaatcaatttccagttgtttctctatttcatcatataacatttcttgatatgatgtatttaaaacaacattttcaaccaatttagaaatttcctcttctgcaaaatcaatttctatttgattttgtttttctttaaaaaatacccttacttttctctgacttattgaacgaccctcaaagctgactaaacattctaaaatgttcttatctcctctaaaattatttactgctctcatattatttagattaccagccaaaacatcatccccttatttaattttgtattttataagtaaaattcataatattataataactacttattaaatatctttcaacaggtatgacataactggttgtttaacatgtaaaactagtctaaattttcataaataattatttattcatttccataaaaactttttcaggtgtaatagggagtgtatttattcttacaccaattccattaaacacagcttcttgtattgctggtaaaggtgtatttataacaacttctccaacagatttagcaccaaatggtccagttggttcataagtttcaacaaaatctactttaacatttccaatatcacatctagctggaatcttgtattgcataaatgtatttgtgtccatgcttcctttttctgtgtatctaacttcttcaaataatgccattccaatcccttgaacaattccaccttcaacttgtatcttagctagatttttatttataaccgttccacaatctactacagctacataatttactaaatcaacttttccagtttctgtgtcaatttcagtttctgcaaaacctgctataaaaggtggaggagatactgggctaccatgagaagcaagacctattaattgattagtatctggaccaattgtagaatcaactgctatatcgaataataaagtgctaccttttttactagttaattttataccatcaaattctacttcatccttctcaacacctagtttagttgctccagcagaaattattttttctcttaagtcttgagctgccttaactactgccatacctgttacataagtagtacttgaagcatatgaacctgggtcatatggaactaagtcagtatcagctgatataactgttatattttcaatgcttgtatcaagaacctcagcagccatttgagctaaaatcgtatcacttcctgtacccatatcagtagaacctatcataagagtataatctccacagtcattcaattttatttcagctgaagacttatcaagaccttgtataccagaaccttgcatagtaattgccatacccacacttctaatttttccattatcaagatgtttacaaggatatttttcattccatccaataagttctttgcctttatttatacattttattaaatcgacactatttaaagttttaccatatgcaaatgtagtttcaccttctgttaccacattttttaaccttaaatctgttgggtccatttttaatttattagcaagcatatttatagttgattcaacagcaaaacatccttgtgatgctccataccctctaagtgctcctgctggcatcttattagtatataccacatctgcaataaatcttgttgcttcaactttattatacattggtaaagttttttctccaaccaaaccaatagttgtagaagcatgctctccatatgctcctgtatcagaaagtgcttttatatctattgcctttattatgccatcatttgtagcacctagtctaacttttaatctcattgcatgtctacttgttgaacaattaaaagtttcttttctatcataaattattttagctggtttccctgtttttaaagtaacaattgcagaaaaaatctcaacacacgcagtttgtttaccaccaaatccgccaccaattctaggttttataaccctaattttgctagctggtatttctagtgcacgagataaatgtctttttacatgaaatggtatttgagttgaacttactacaaccaatcttcccatatggtctaaataattgtatgccctatacgtctccatcattgcatgtgcttgagcttgagtataataagtttcttcaatcactacatcacaattacttaatactttttctacatcaccttttgtataatcatgatgggatactatatttttttctctttgcatacctatatcaaagttacaatgtctatcttcatcatgtaccatagttttatttcctattgcctcttcaaaatccaaaacaggtgtaagtacttcatactttactttgataagattcattgctttaattgcagttttttcatctatagctgccactatagctacttcgtcacctacatatcttacaacatcttcaagaattaatctatcatatggagatggctctggatatgtttgaccagcaagtgtaaatcgagattttggtacatctttatatgttaaaacacattcaacaccatcaaccatttctgcctttgatgtatctatatcttttatttttgcataagcgtgaggacttctaagtatctttaccaccaaagcattttttgctgataaatcatctgtatatacaggctttcctgttgtgatactcattccatctattttcttgattccttttccaactatattcatgttctattttacctccagataagttttgatagctcttaactgtcccatataccctgtacatctacatagatttcctgtaagataatgctttatttcatcatctgtaggattttcaagctcatccttcattgcaagtacagtaagtataaagccaggagaacagaaaccacattgctcagctccttcttttaccaaaacttcactaaattctttaacttcattttctaaaccttcaattgtagttatttctttatctaaagctctcaatgtcagtgttgcacaggataatgtaggtttcttgtcaattaaaactgtacataaaccacaacagcctgtgtcacaacctcttttcacacttaaattaccaacttttcttaaagtatcaaccagatattcttctggttctatatcaacactttttttcttcccatttatattaatctttactaacattaaataacctccattatagctctttttaaaagtactttactcatagcttttctatactccctagatgctctcatgttagaaccaaaagttagttcttctgatgctatttctactgctttatctatattaatttcattgatttcattgttagatagaaattcactagcttgttttgcaatcgtagctttctgcggtcttgctcctacacataacttaaattgttccatatgttttgatacagatacatttagaattggataatcactctttgcatttctaagtgatttataagaagcattcttatttgtcttctttatgtatatcttaataagtaaatctttctcataatctctatttagaaactcttcaagactaattctcccaatattatataattctacttccgtatctaatgaaagtaatgctactatcaagtcagaaaaaccatatttagaaaatactgttgcaccaactgttactacatttctaaactgaactcctattatatttttaactgaatcttctattattcttccaaaattattttttattatggaacttgtttctaatgttctaaaagtagtcatagaaccaatctcaacgtaatcttcatactcttttatataatctaaatttaatttagataattctattcctgttcctattctttttttccccattcttaaaaaagcacttccaccaattacttggttagtttttcttttatttaaaattgagtacgcttcttctactgtatctggctgtacaatatccataaccgtaaacataaatttcctcccttatttgctattcttattttaaatacaactaattatatcatagcttcaacaaattttgataataaatatgtctaatatgtaaattctgtaaattacttatacataaaaaaatgactatttcaataatcatcattagacaatattaaaatagccattaacaggtactattttaaagcaaaactttaaaaagttgatactttttcacttatatttatcacttcttcttctaataatccaagttttttagctactaattttgtagtacttccttgtattactaatgtaattaatatagtcataaatactacagatgaaatcacttcgtatccaggaactttcattgctgaaataataccacaaagtgctgctggtattacgcctgtttcccttacccacatcataaataatatttcacttttactccattttgcttccctgtctacaagtgtacaaactaaaacgcaaagtggtcttgctataaacattaatactaatactgtaattacagatggcataaaatatttacttaactgagccaaattaacttggctacccaatattataaatattgccatacgacaaatagtacctaaagtttcagcaacataaaaatctgcatcataagatttttgacttaaccaaattttaaagtttttcttgttaccagttattatacctacaataaagcaagacatatatccacttccacctaattttgtagataattcatatgcaactacaactgaaataacagatattattggtgcaaaatctttaaatattccataaggtttatcattaactaatttcaaaagcagtattcctgtaattaaaccaactaaaactccgacaataaccattgtccccagttcataaatattttcacctaatgaaaatttatttgacaaaattacagccaacactgctgatgttagtatagctcctgttgcatcattaaaagctgattcacttattacagtttgttttaccctatcctttatctttacctgattaaatataggtacaagagtggctgggtctgttgatgctattatagttcctgctagtaaagcagtcattgcacttatcccaaaagtaaatcctattacttgttgcattataaaagcagatatcacaactcctaaagtagctaataagaatacagatatcttcacatttctcaatacttttaaacttatttcttttccacctaaatataaaataaatgcagaaccaaatgtaagtattagttgattttctatttgaaatccacgaatatctataaattttaaaaatgatggtcctattaaaatacctacaagtaaatataacactacatctggaacctttattatttcactaagcttactacaaattattccagttatacttacaatagcaaaaattatcaataaattattgctggcaattgtgtgtatagatgcttccatgtccgtctctcctcccgatttgcatacattatgcaatatacttattgttttactatataattatagcacacaaataaatgttatcaatcattttttttaggacatgcaatttagctttcatttttgataattaaataacgcttatataattttgctattttttgctagttattaaaaggttgattttgtcaagtttatagtatatatatattaatattttttatatccatatctttttagatatttttcgactttttcctccattaaaataagtttaaatttaacaataaaacatttcattatatatattttttaaaatgtaccattttcaacattttcattaacttggtctattcatttttttcttatctattctatatccaagcatattccctatatttttacttacatgtaattcttgagctatttcaagtttattatcattgctttgttttatcttagaaatctcactttgtttttcattttgtttatcttgtttcatagtttctcctttcaaaacaatatcactttttctgtttattacttattatttcaaatttctataattttaatcaaaaaagggaaatatctcaatataatatagcttactcaacaccatatttatatatagaatttccctaattattttattaatttaatttttcaataaccttatctaaattagaatttactttatcttcctttttccaagaatttaatgtataatgcgttccaaatgtaaataaacctgaaactattaatataaaatagtatacaaacccactatataagagtacagagtaccccaataattcttttggaattatattggagaacatagtaaaaaatgtaacctcattagctccaacatttcctggtgttggaattggtgatatagccatatataaaaagacctgtaatgtcattatatgtacatatgaaactcctcttaaatttgaggctttatacacacaataaactatactgaaatatgcgattaattgtaacacagtaagtaatatacttaaaactaagattcttacatttttaataaatatttttatagaataattataatcatcaatataatgatttattctatcacgttttgaatctaaaaatttaaatgttttaaatttagataaaaaattaatcaaaacttctgctatcatttttacttgttttggactaaatactattaatagtccacctaacaacatacttacattcataatcattccaaaagttatcaagactttcacagaatgtacttgctccatcagtaatgacttatttagcaaaattaaaattccacaaaatacagtaactgtactttgaaatactacagttttattagtaactatagccactgatttactaaggcttacatcatattttgtaagtgcatatatttgcattggttgactcccagatgcaaatggagtaactaagttatagtaaaatcccattgtagccattttaataccaataaattttacttttgttttttgaactgcatttattatcaaatgagttacaatagattcaattatcatatatactataattgtcaatatgccaagaaatatataagtcttatttactagccttataattttaggtattagttttatatctaaagtagttaatactaaataagtagtaatacatatcaaaaataataaaaatccatattgaataaaatctttttctcttttggataattttctcatttattttctcctaaattttttcatatcactatacatagtatactacttaacctattatttgcaagactaaaaaagataagtctttatttgacataaatacacctataaatttttaaatattcttactcctttagtagaaataattctccatatcataaaatctaatataaaagtaagtatacttgccaaaataatatatatatttaaaaacgaaattccaagtaatacatatatacctccaagtataattacgtaagctaatgatactaacattgtaattatcatacttgcacttctttttactacagccatctcatttttccaatcaaggtttggatataataaatttgataataatcccatcaatgccacaaacattgaaaaacttgcaatcaaacagattgatacaataataaactgaatttcaaaacctaatcttatagatactaatattaaacataaaatagataatggtgcattcaataaaaaattcatcaatatttttgaccagaatatttctctttcatctattggagaagatttcagtatccataaattttttccttcaagagaaattgaacagtatgttgtacaattcattactattataaagaagaatactcccaataattgtatttttataaaattaaaatctatattcaatttcagtaactcacccactttatctgctccaaataataatattaaaattgtacctattattaggaataacaaacctgcagatgaatttaaaaagtatataaatgaagaagtatatctcttaaattctttttttaatagagcttttgaaggtcttgaagttttttggctcttaaatttataagtttttgacttatatccttcactcatcttagcatttatatctttaaatttttttgcaaataatgttacaaacataaaaaatggtattattgaaattgctataaatgctaaaaaggaaactacacttcctgttttaagagcgtcaacaaaataatatataggtggatatatttttctaatcgtctctgaaatagatacactattctttaacatctcaaccgacatagagttaagtcttgtcataagtagagtataaagcaacatcaatataatactacctataattaatattaaatttttgtattttattcttgatgatatctgtcctataaacataaaaattattgatgaagcaactattggtaataatggtaaagctaaaaatagcagtatcaaataagggaaatacgttatacttacatcagaattaaaaaaataaaccactgctggtataatcatacatattgaagaaaataaatagtttgctccaaccaacattaatatcttacttgctagtacagtagattcttttataggtaaactagtcaaaaggtctaaatcttttgcttgaaacagatatgatgacgttttatataatgatgtaacaatagttgttaatgttgataatccaaatccaaatataagtagcatttccatctgatttatttgctttaaaatatcaactaaagaaagacttatactagttacataaaaaatcaataaccctgttataataacaactgaaagtatcatccccattattttttgtttttctctactatcagctttttttaacgcatttaatttaaattcatttattatattagtttttattaatatacttagattgctcatattttatcattcctcactttagacactatattgtataaaaaacattttatttctctattaattccataaagatactttcaagtgaattacttcccttaacttcttctgtagttccataagcaattatatttccatcttttattatggcaatcttatcacaaattttttcagcaacttctaaaacgtgtgttgagaaaaatatacaaccacctttgtcacaaaactccctcataatttccttcaatataaaggaagcttttgggtcaagacctacaaaaggttcatcaagaattaagatttttgggctgtgtatcaaagccgaaattatagctaatttttgtttcataccatgcgaatatgaagatattaaatctcctaatgctttattgagttcaaacttatttgaataatattttattaactcttctcttttgtctttggcaacttcaaatatgtcagctataaaattaaggtattgtatacccgttaatgactcgtataaatctggattatcaggtatatatgccatttcctttttacattcaacaggctgtttttttatagatttagaatttattagtacttctccctcttcaaaatcgtgtattccaacaattgctttaatagtagtagttttacctgctccattatgtcctataaacccaaaaagctctccatcatttacatcaaatgagacactacttactacttttttatttttatatgatttagatacattgattacttttaacataatttccctccatattatagttttgatatttgttatatataatatataacaaatatcaaacaattacaacttttatttgtttattttagaaatctataaaatgcaaaggtatcagaaatataaaggtataaatataattgatatttactttcaaattacacataattataaaagaatatatagttcgatttgaataaacaatgtataataaaaaatagttgactataattattaaatataaggagcaaaatatgaatacatttgaacaattaaaaataagttccactctaatagatggacttaaaaaacaagacataacttctccaacagaagttcagtcacttgttatagggaatataattcaaaataaggatttattgattaattcacagactggaacaggaaaaacactagcgtaccttttacctatatttgaaaaaattgatacatcaaaaagagaaacacaagctcttatacttgcacctacgcatgaattagtaatgcagattacaaaccaggttgaattattggctaaaaatgcagaactctccgttacttctttagctttaattggggaggtcaatatacaaaaacaaataaaaaatataaaagcagtaaaaccacacatagtaattggctcttgtggaagagttttagacttgataaaacaaaagaagctaaaatcacataatataaaaactatagtcttagatgaagtggacaatctattgaatggaaaaaatataacttgtatagaagacataataagaacaacgttaagagatagacaaattataggatgctctgcaagtcttactgatagcactataaaaatttgtgataaacttatgaaggagtttgaaataataaaaacaaaggaaaaatcacaaataaatcctaacatcaatcactcatatttattaggtgagataagggataaatttacttttcttagaaaggcattagcagctacaaatccaaaaaaagctattgtatttgtaaataatgaaaaaaatatagaagtcctagtatcaaaactaaattatcataattacaaagcaataggaatttttggaaatatggaaaaagaagatagaaagaatgcaataaataaatttaaacttggtaaagcaaagattttaattacaactgatttatctgctcgtggactagatattgtggatgtaagtcatgtttttaacttggattttccaaaaagtaaaaatgaatacctgcatagatgtggtcgaacttctagaggaaatcgaagtggtaacacaatctcaataataacaaaaaaagaattagatattataaaagatttgcaaaaagagttcagtatagtaattacacctaaaactttacaaaatggagaactaatagacattattaaataatacaataaatacgaaaatacaacaaatacaaaagagctgtagtttatcatcacaattgataataaattatagccctttattttatattaaattaaaattttaaataatacctattataatagccaaagttttattataaataatattgccagaacaatcattactacagaaacatgttttttgtcttctgcctttttagctccaaatatattataaaatatatttacgaaaacataagttaatatacctaaagttaaaccatcacctatactatatgttaatgccatacaagcaatagtaacaaaagctggaacaccttcagttatattatcaaactctatatccttaactgtaccaagcattaaatatccaacatatattaaagctggtgctgtagcacatgatggaattgctataaatacaggagagaaaaacattgcagctaagaataaaattccaactgttattgctgtccatccagttcttccacctgcgataactcctgttgaactctcaacataagttgtaactgtagatactccaagtcctgcaccaactgtagttgcaaccgcatctgtaagtaaggctctacctacattaggaacattccctttttcatctaacatgtttgctttagaacaaacaccaactaatgtacctactgtatcaaaaaaatcaacaaataaaaatgtacaaactactactaaaaaaccacctatatttgttggatgtagtacatatcctaaatctattttacctgctattggtgctaaactttcgaatttaaataatccaccaggtaaatatatacctaatttttgtgcatactctggattcataaaagcaaatgcccaagcaagtaatgaactcactactattccaaaaagtatagaacctttaactctttttttatctaatacagcaataattattaatcctaaacaagttattattactgctggtgtaaatctacccattttgataagagtggcttggtctccaataacaattccactgttaactagacctataagtgcaataaatattcctataccacctgtaacagctaatttcatattttttggtatcgcatttacaacagcctcacgaactccacttactgataatactataaaaataataccttctacaaatactgctgtaagagctacttcccaaggaacacccatttgtaaaactactgtatatgcaaaaaatgcattaagacccatacctgatgctaaagcaaaaggaaggttagcaactacacccattaaaatacatccaaatgctgctgctaaacaagtacctgtaacaagtgcacctgcaggcatgcctgtctcagataaaatatttggatttacagctattatataagccatagttaaaaaagtagttactcctgcaattatttccttcttcatgtcgacatttttattagtcaaaattggaaaaagtttctgcatagtactactgtttgttgtttgcataacaacacctcctattaaattttacaaaaaaacgacacagtagttgataagctgagccgtatccttcataattcagttaattaaatatttaattaactaaataatagtatacatagtcagaatatttacggtattccggtagaaacttatgacccatattgtcaaaattatatgttatacagtacaaaacatgaatttttctttacgaatattattttaatttatataattaattttgtcaatatatacgtatatattgtattgattttgtattaatattcgattatattaaatattgatttattaaattcaaattataattatattctttacattttaaaaaaatatatgatattttgatacaatttatttatagtttggatataaagtttatgttaagattatactataataaattaataatttttttatttggaggaataaggtgaaagatttaactacaggtcatgagggaaaatccatattcttttttgccatgcctatgcttattggtagtttatttcaacaactatacaatacagctgacagtataatagttggtagatttatcggaaaagaagcaatggcggcagtctctggagctaaccctataatgtttttattggtggcagcgcttatgggtgttagccttggattttctattttagtgtcacaattttatggctcaggagatttaaaaaaggtaaaagctactattgatactacatatatacttttatttattggttctatattaataagtattcttggaatagtatttggtggcccaatgcttaagcttatgaatacaccagaatccgtttttgctcaatcaaaattgtatcttactataatatttagtggaatattattttctgctggatataattcagtaagtgcaatacttagaggacttggagattcagtaactccactttattttctgataatagccacaattctaaatatagttttagacttaacttttattgtagtgctaagaatgggtgttgagggcgttgcacttgccactataatggctcaggcagtatcatttataataagtataatttatttaaataaaaaacatgaagtgcttaaatttaaaatcaaaggaattgtatacgataacaaaatatttaaagatggacttagattaggacttccaagtggaattcaacaaatgttgttttcaattggaaatatgactcttcaatttttagttaatagttatggtacatctgctatggcagcttttggtgctggtcttaggatagaaaattttataagcttacctattatgaatcttggttctgctgtttctacttttgttgctcaaaacataggtgctggagaaaatgaaagggttaaaaaaggcattcgagaatctataaaaatgaccttagttttagcagttacagttattgctttaattttgctatttagggaaaatctaattgctctattcaatactgataaagatgtcattaaaattggctcttcttacttatttataataggaccattctttttatttattggaacttcttttgtactttcaagtgcaatgaaaggtgctggtgattccatgtttgcacttataagctcaatagtatctttatggcttggaagacttccagcttcttatatgctttctaaattttttggaacagacggaatttggatgggtattccttttggttggactttaggtcttattgttacagttatctactataagaaagggtattggaaaactaaagctattgtaaatcatagaatcaatgaataatctttttataaaatgtattcacattcattgtattcacctccattatgatataataaattatggaggtgaatataaaaatgggtattattcttaagccaaaacaattttatatgactgttatagttaccataattctctacttctctcttaattacagtttcaacataaaattttctatatgcttatcttttttaactatcttgatatgggctgtagactcagttgaaaaaacttttgttgcattgttttttgtaattctagcgtttatatttaacattgcaccaataaaggttattttacagtttttatttacagaaaatttttacataataattcttgcatacataattactaatgcagttacaaaaacaggtgtcgcaaaaattatttctgagaagttaattttaaatactgtaaatacccctaaaaagatgattcttttatcgtatattttaggtattcttttaatattttttatcccacaaccatttccaagggttattcttgtatctgctttttacaaggagtttttaaaagaacaacagataactgaagattcaaaatctatacttttatttagtatatttacagcatctacctttacatcaatgttttttgtaaatggagacacccttctaaattatgttgtactagaacttggaaattgtaatataaattggggtcaatgggctttttatatgtctgttccaactataattacttgttttataacttattttttatttatctttgtctttaaaaaagaattgcattcaataaaatttatttctaatgaaaatcttgagggtaataaacttcatttttcatattctaatttaaaaaaagaatttaatttgctaaacaaagagcaaaaacacgtatttttatgcctaggaataatgttttttatgtttttaactcagttcatacataacataaacacattaattataatgtcaatttgtgtacttcttttattactaagaaaaatagttggatttagtactttaaaagaaataaattggaaggtccttattttttttatagcagcattttcaattggaggagtgttaaagtactctggagttgtagatataatgggaaattatttgataaagtttataccaaactcttcagaaattatttcaatattgtttttgataactctcacaataatcttgaatatatgtcttggaagtgctgtcactacatcatctgtagtaataccattacttggaagtttacatatactaaaggaaaatagtgttactttatgtctatttgtctacattatagtaagcatacagtacatattaccatttcatcatgctacaataatggttggtcatggtgaaaatctgtataatagcaaggttattttcaaatacggtttaactttgattcctttaacctactttataataatatgtataacattcccttggtggaaatttataggactagaaatctaaaaaagatgaaaatatgaattaacttaagataataacgaaattattaaaaagaaaattcatattttcatctttttatataagttcttgtgaaattggacaaaactactcttttaccataatactaaatattatttgttttacttccttttccaaaagtattctcccaatcctctataaacttatctacactccaatcagttaatggatgattcatcatagatttacaaatatcatatggtactgtaacactatgcaccccatgttgcattaattctataacttgttgtgcatttttaaaactggctgcaagtacttttgtatccattttataagtatctattatttttataagttctgaaaccatagctactccatcaccagatatattatcaagcctatttacataaggtgcaatataatttgctccagcctttgcagctaaaaaaccttgatgagcagtgaatattgcagtagcagttatttttacaccttttctgtgaaggtcttttatagctcttaaaccatcttgtgttacaggtatttttacatatatattttttctcaaactacttatatataatgcttcgtctaatatttcttcatactttgtacttaacacttgagcatgtataggcatatcctcacctataatctcaccaatttcatttataagttgcttaaaattctttttttcttttgaaacaatacttggatttgtagttacaccatctattggtaaacaagtacataactccttaatctcctccacattacctgtatctaagattagttgcattaaaatatccccctttaatctttctttattcttattatatattgatttggtattattttcaacattttgcttattgttttttattttttattattgttttgcttttccttcttagttttataatttttttatttactaaattctaaatatatagttagaaaaaacatactttttatattaaattaattttgtatttcatgttaaaatagttgatatattgtattttatcttataatatttactataatactatattgcgaaaagaggtagaaaatgtttgcagaagaaagaatccaagctatattaaatatcctaaaaaaagaaggtagagttactgtcaaagagctcagttctaaatttaatgttacagaagattgtataagaaaagatttaaaaaatatagaaaagatttcttcaataagaagaatttatgggggagctgtactagctagagaaacactagagaatcaggatacaaaagacagaaaagaaattaatattccaacaaagaaaataatagcagaaaaagcatttaatttaattgaagatagagaaactatatttttagatatctctacaattaacatcttgcttgcaaagttgttagctgaaagtaataaaaaagtaacacttgttacaaatatgttggatatactaaatgtagttacttcaaaaccaaataatttaaatataatttccactggaggtttattaaatctcagtttagacggttttgtcggtactccaactatagagtttatatcgaaatataagtttgataagacttttatgggaagttgtggagtagatgtattcaactcttcacttacaacttttgaaattgaagatggtctcacgaagaaggctataataaattcaagtaaaaaagtatttatagttatggaagataaaaagtttaaatttgatggaaatttcaagtttgctcatttagaagatattagttctataattacagaaaaagcgcctactcctgatatagtagatattttatcagaatttaatgtaaatgttttataagtttaattatatattttataggatttcttataaatataaatttttatttgataactattcttaaaaacatatttctataatatttattttatccttagtatctattttttaaaatctagttctataacatctactttatccttatgtctatttataaaactaatttgaaatagactttctaaatctaatacagttatttttagaaagtctatttccttaaataaactatttaatattactggctactttttatatgaatacaataatttgttattcataaataaaagcttatttcatttcattcttcatttgcttctctaattctttagaaaatttcttttgttcatatctttccatcatctcatcttttttcatttctaagtttaccatagcaccttgtgcatcatctttcaaatcttcagctgtatttttcataacataagctgtctttttaacaccttcttttaaatcttctttcatatttttcatatctctttttaatctatccatcaaaactacctcctctgtaaatataatacttcctatatttatttttcccaaagtacatatatttatttgtaatatcaattataatttttaagtcttaaatatagtttaaactgtctaaatctatacatttcaataaattaaatattttttatttcaaaataaaaataacactaagcatagattatatgctcggtgttattttttaaattcatagtaacttaattgttgggttactataatgatgacttatatggaggatgtaaggaaatctcatcattatagttggtgtattttatggttttaagcttctttatatttatataatacagtttcattatgaattttttgtgattttaaaatgaactattattgaaagttatatattctttataataagtaattaatttttaaattctactgtgaatactacagagttttctttgttttttatgctataatcaaacccatgacttttaaaaatttgactgactatataaagtccaagtccacttcctccagtttttcttgaacgggatttttctattctataaaatggattaaatatctcttctaaataacgtttctcgatagttacaccagtattttcaatttctaaaaccactctttgattagaagtctttttacttattcgtttatttttatcatagagtctaattataagctctgatttttcaggagaatattttatggcattatttattatattattgattgccttagttattctctcttggtctgctttaatttccaaattttcttctatttttaaaatagttttcatatgtttttcttctattaaaaatacttgtctctttacaagtctatttaataattcacttatatttattgataccaatttcaaatctttttcaagtatttctgattttgaaacctctatcatttcatttactaaatcttttaattcttgtgtacattcatatgattttttcagataagtatccctatccttatacttacctacactataaatcataccttcaatttgaccacttattatggttattggagtttttagttcatgtgatattgtagcaacaaaatccttccttctatattcctgttctctctcactctctattatatttataagaggctttgttattacaattgaatatatatatgctccaataatcgctatcaatattgctattgatatgatgtatggcattagttttcttataacttcgtttgcttcgtcaattggttgtaatggcataacgagttctaaagtatatggaccatcttttgcatctttagtatatataggtatagaagttctatactcatcctcaagactattaatcatgtacttactatatcttaaaataactacttcattcttaccatatacaattttcccttggttatcttttaataaaatagccaaattttggtctttagccatataataaagtctttcttctaaagtatatgtatcgaaatgaattgaactatctactaaagattttaaactttcttgaagagactcaattttatactcatgataatatgatggcaataaaaaatataaaattagatatattattaaagctaacgctattaataatgatgtcgttattgaaaataacttatactttatacttaacttttcccacttatcaaatatccttctcaagtgtatatcctattccttttacagttttaatatatggtaacgatattttttttcttatattttttatatgtgcatcaacaatcctagtatctccataatagtcataaccccatatactatccaaaagaccttccctagttataacttgtggatacttttctatcaaagcttttaatatattaaactcttttagtgtaagttctataggttctccatctatctctgcaatatatgtgtttaaatctaattttaatttttcaaaaactataaatttgtcatttatagtcttgttacttcgccttaaaattgcttctactctttttataagaagattaaatgaaaatggttttgttatataatcatcacattctaagtcaaaccctttaagttggtctccttcatcatttaaagcagttaaaaatataattggaacgcttgatgactttcttatcattttacaaactccataaccatctaagtttggcatcattatatctaatattactaaatcataacttccttgcttaaacttttgtataccttccaacccatcatttgctgtatcaacttgataaccttctgcacttaaaaattctgatattaactcttgtatatttgaatcatcttcaattacaagtattgacgaattcattctatcaatcctttctattttatttaaaatttcgtatattacttatattttatcttattgttgtgaattttacatgaaaaaagagctatcttaatttgtaaattaatccttttaatttaaagatagctcttttggatacattttatttaatttattaatctaatctctcttatatgccttgaagtttttaagtctaagtgcatttgatacgactgaaactgaacttaagctcattgctgctgctgcaatcattgggtttaataaaggtcctccaaatacatataatattcctgctgctacaggtataccaatcgtattatatccaaatgcccaaaataggttttgttttatattttttatagtttcatgactaagtttaattgctgttggaacatcaattaaatcactcttcataagtactatatccgcagattcaatggctacatccgttccacttcctattgctatccctatatctgcttttgcaagagctggggcatcatttattccatcccctaccattgcaacaaactttccttgattttgtagtttttcaacttcttttgacttatcttctggtaaaacctctgccaaaaccatatctatacctacttgatttgctatagcatttgcagttttcgcattatctccagttaccattgcaacttttattcccatatcatgaagtatttctattgcttttttactactttctttgactacatctgcaactgctattatacctgataaatttccatctacagctatatacataggtgttttaccttggcttgccaatacatttgatttttcttctaaatccccaagctttatattattgtcattcataagctttctatttccaagtaatatactttcatcattaatagtaacttgtataccagcacctggtatggctttaaaattatcaactttttcaaattttatattcttctcttctccatacttaactattgcttctccaagaggatgctctgaacctttttctgcacttgaagcaatcttgataagatattcttcttttacattattatttaatactatatctgttacttttggctttccttctgttatagtacctgtcttatcaaatatcactgtatttactttatgtgcagattctagtgcctctccaccttttatcaagattccattttctgcgccctttccagtcccaaccattatagcagttggtgttgctaatcctaatgcacaaggacaagcaattacaagtactgatataaatatagtaagtacaaatactatatcttttcctcctattaaaaaccacaataatgatgcaactacagctattgcaattactattggtacaaaatatccagatacagtatcggcaagtttagcaataggtgcttttgtaccttgtgcatcttcaactaactttattatttgggcaagagcagtatctccaccaattttttcagccttaaacttaataacaccatttttattaatactagctcctgtcaccttacttccaacatttttttctactggtatactttcacctgtaagcattgattcatcaactgatgtatatccttctattacaactccatccacgggtattttagttcctggttttactaatagtatatctcctatctctacttcttctataggagtttcaacttctttaccatcaactaacactattgcagttttaggttgtagccccataagctttttaattgcttctgatgtttttccttttgattttgattctaaatatttaccaagtaagataagtgctattattattcctgcactttcataatacaactgatgatggtgcataccttgaatttgtccattggctatttgtagtgtcgtatatagactatataaaaatgcggctaatgttcctattgcaactaaagaatccatattagggcttaaagaaaaaagtgatttaaacccatttatataaaatttataaccagctatcattactggtattactaaaattaactgaattaatgcataattaaaagtatttgtcataggatttataatttctggcaaaggccatggccctataggctttattatcataggtcccattgctatataaaacagaggtactgcaaatactattgcaactataaatttaacaaataaagacttcatttctctttcttttctcaatttatcttcatccacatcaaccttatttcttacctcttctattggtttatatccagctttttcaatagctgcttttatttgagataattttacttttgatgggtcatagtctatattagctttatctgttgcaatattcacactaatactttctactccatccaatttttttaccactctctctacagcttttgcacaagctgcacatgtcattccatcaattttcatatcaatttttttattactttcttcctttataattccatatcctgctttttctacaacctgctttatatcatcaaaattaaccttagaattatcatattctattttaagtttttcagtagctatatttacactttggtcatatactccatccatcttcttagttactctttctactgcctttgcacaagctgcacatgtcatacctgtaattttataactttctaccactttatttgaactcataataaaatcttcctttctttcaatatattttcagctaatttgtaacgttttattttgatatgtaatattgataaattacttatttagaaatctatatttttattataccccctataggtatattaaatcaatatttttttaataaataaatgtattagttatatttatttgtatttaatagaaaagtatactcataattaaatgtatatataaaaatagagcatctaaattgtttaatgcttatacaatttagatgctctatttattataatttatattttatttaaaatttattctttacatgcttcaaaaaactctgcttctgtttcctttatttcaagctcattgtctattattccaacagcttcttttttaaatgctctacactgacctatacaaccagtctttacattttcttctccaaccaaagtttttagcttatttacatccacatttgaacagtttggacatactcttatcatatttaagttcctcctaattaatgtctaattaatacttttatacccaaatataaactttataaaagtttttttaatataaattattaccatatataccatttatatcctattgtgagtattacatattaattttatatattattaatactacatgtacggtggtatctgttgttttctcactatttccaattccttaatttctaaagacttaatcacatttactttatagttttctttagactttatatacaaaacatcttctatctttttaccttcaataaatttatgagaccacttaagaagttcttcaaaattacaaacttcttcttttataaaagtatcactttcacttgcaaaatatttaattattattttggttacttccaacatatatcatcctttactcttttattaatctttttatctattaagattattatttgtctaaaaaatttttttaaacagaataattttcagatgcaaaactaacagttttatccaatttaaactatattaatacaatttaatatattcctccttgtacctaataatatattgtgctataattaataagttattttaatcgaagggagcaacaaaaatgtcacaaaaacataaaattataaatatcgcagttatagcccacgttgacgctggaaaatcaacattggttgatgctttcctttctcaaagcggtgtttttagaaagaacgaagtagttaaagactgcgttatggacagtaacgaccttgaaaaagaaagaggcataactatatattcaaaaaactgtgcaataaactatgaagattacaaaataaacatagttgatactccaggacacagtgacttttcttctgaagttgaacgtgttatgaaaactgttgacacagttattctattagttgatgctagtgaaggcccaatgcctcaaactagattcgttttacaaaaatctttagagttcggtttaaaaccaatattatttataaacaagattgataaaaaagaccagagagcggaagaagtagttaatgaagttttcgatttatttgtagacttaaatgcaacagatgagcaatgcgaatttcctataatatatggtattgctaaacaaggtattgctaaacttgaaatggatgatgatagtgaagacctttctcctctatttaaaactattgtaaatcacgttgaagcttatcctaattacgataatgaacctctacaattccaaatatcagctcttgcatatgatgattatgtaggtagacttggtataggtagaatttacaaaggtactcttaaaaacaatacacaagttgctatatgtagagaagattctgttgtatctaaaggaaaagtatcaaaactttctgtgtatgaaggtttaaaacaagttgaagttgatgaagctactagtggagaaatagttgttatagctggtattcctgatatatctataggtgaaactatatgcgatttagatagtccactacctatggaaatgataaaaatagaagagcctactctttctatgaacttcttagtaaacgactctccattcgttggaaaaagtggaaaattcgttacaactagacatttgaaagatagacttgaaaaggaacttgaagtaaatgttggtcttaaagttgaacctcttgatactactgatggatacaaagtttctggacgtggagagcttcacttatctatactacttgaaaatatgagacgtgaaggttatgaagttggtgtttctaaacctgaagttttaatgcataaagaagatggaaaactaatggaaccaatagaaagagttgttgtaaactgtcctgaagtttactctggtactattataaatgaattaaacatgagaaaaggtatgatggagtctatgtcaatagaaggagactatgtaaaaatagagttcttagcacctactcgtggtcttttaggatatcgaagtgaatttataaacgctactcgtggagaaggtactttagttcgttcatttgaaaaatttgaagaatttaaaggagaaataccttcaagaggaaatggtgttttaatagcacaaggacctggtgttactatggggtattctcttaatgccttaagtgatagagctgtaatgtttgtagaccctggtgtagaagtttacgaaggtatgataattggtatgaattccagaaaagatgatatggtagtcaacccttgtaaaaacaagaaaatgagtaacgtacgtgcttctggttcagatgatgctataaaattatctcctcctagaatatttactcttgaagaagcactagagtttatagaagatgatgaattagttgaaattacacctgattctataagacttagaaaaagattcttaaatgaacatgatagattaagatataacaaatctagacaaggtaaataaaacgtacatttacctctaattaacaaaatagccatatagtactgaaaaattatttcagtttatatggctatttttatttgaaatttatattattcaacatttatataattagctgcttgaacggctgcaatagctccatctgatgctgctgttattatttgacgtaaaaacttagttctactatctcctgctacatatacaccttctactgatgttgtacaagactcatctgaaattatatatccaccttcatccaaatcaagaacattttcaaacattttattattaggtttaagacctatagcaataaaaataccactaacatctatagttcttttttcttcagtctttaagttttttacttctattttcgatacagtcttttctccttctattttttctacaccatgactgtaaagtatctcaatattctctcttgctttcacagatttctccaacacttcttcacctctaaaactatctcttctgtgaattaaatacacttttgtacaattattagctaaaaataaagcatcttctagtgcagtatttcctccacctactatagcaacttctttatctttaaaaaaggctccatcacatgttgcacagtaagatactcctctacctgtaaattcttgttcccctgcacaacctaatttacgtctttcaactccatttgcaagaataacagcctttgctttatgttcacctgaagaagtttttacaacctttacttttccctctaaatttatctcttcaacctcatcaaactgaatatcaacaccttgagcaactgcttgattgtatatattattagaaaattctaccccagaaatcttttgaactgctggataattttctacctcagaggtacttgcaacttgacctccataaatatttttttcaaatactgtaacgcttaaccctgctctcatagcataaattgctgaagttaaacctgctggtccagcaccaattacaatgatatctaccataatgtttacctctctttatattattatttcttatatattattctcatcattcttatactttactattattatccatatatactacaaacaaaacattattttttattaattaactttattttacatatatataaaaaaactgcaaataaaaattaacttttatttacagttctcacttatttatataattcaaaaccttattggttatcatttacagtgtcttctaatatattgctttctgatatatatgatagaattgaaagtccatacataaccaaaactaatgctgctgttataagtactattcccatatttaatacctccttttgtttacagtatactattattatgtgaaatatttatgaatttaatttgaatatatatgtaatttcacactaacaatttcttcaaattaaacattattaactatatacttttgttgaaccaattatgattaatagtttaaatattagcactatttacttatatttatatgatataccatataattacatttttcaaattaaagttttgtaaactttttttgtaatatagtgtagtataaaattgtaatattacagatatttaatagttatcttttgattactttcattaaaaacagcttcatcactatgaaaatctaggtttttaaacttttaaaaaagttaaaaaaatatttttctaatactcaatttgattacaatttttttacaatttaaaaaatattttttccaaatttttatattaatacttgactttgtctgttttataaactagaataattaataatattaagaatattgaaaggcattgattaggaagagtaaatctgaatcgattaccagagaaggaaactactagctgaaatgtttccctaattagaaggattgaaaactacctaggagcttctatccgaagttatcttaatgattttagtaggaatagacgtttttattacttgcgttaaagtatcaagtggattttttaaaatcaatttgggtggaaccgcgggaaacagattctcgtcccttttttagggatgagggtctttttttattacctaaattcggtttttaaaatattctgtatctaatttaattagctaattaaaaatttaaaatatatggaggattataaaaaatgtattattcaagtacgagaggcaccgaagaaaaagtaactgcatcacaagcaataataaaaggaatatcaagtgatggtggtctttatgttccaagtgaatttcccaatgtaaaaaatgaacttataaatttagtaaatttaacgtattctcagatagcattttttgtacttagtaaatttttatgtgattttactgaagatgaaattaaaaattgtatagaaaatgcatatgatgaaaagtttgattgtagtagtatagctccattaaataaagtaaatgatacttatttcttagaactatatcacggtccaactttagcatttaaagatatggcacttactataatgcctcatcttcttaaaacatctataaagaaagataatttagagaaagatgttgtgattcttactgctacatctggagatacaggcaaagctgcacttgagggatttaaagatatagataaaataaagataattgtattcttcccagaagatggtgtaagcccagtacaaaaacttcaaatgaaaactcaaactggaaaaaatacatatgtagttggtataaaaggaaattttgatgatgcacaatcaggtgtaaagaagattttttctgataaaaaatttaatcaaaaactattggataataattatatattatcttctgcaaattcaattaatataggaagacttcttccacaagttgcatactatttttattcatatatgaaattagttagcaatagtgagataaatttaaatgataaaataaattttgttgtcccaactggtaattttggtaatattctagctggatattatgccaaacaaatgggtcttccaataaacaaattgatatgtgcatcaaatgataataatgttctttatgatttctttaaaactggtgtatatgataaaaatagaacattgaaattaactacttctccttctatggatatattaatttcaagtaatttagaacgattactgtttgaaatatcaaatagaaatactgatattgtaaataagctgttatcagaccttagtgataaaggagtctacaaaataagtgatgatatggaaaaaaatttagcctcattctatggagaatattcaaatgaagaagaagttaaaagcacgataaacaatgtgtttaaaaattataattatttgatagatactcatactgctgttgcatacaattgttatgaaaaatataaaaaagaaacttctgataacacaaaaactgttattgtaagtactgcaagtccattcaagttttctgaagatgttctaaagtctatagattgtgattttaaagaccttgatgactttgctataattgatagattatcaagtatttctaaaatagatattccaaaacctattaaaaatcttaaaaatgcagaaatactacataaagatatttatgaaaaagatgaattaaaactagctataaaaaaattcttaaaggtataggtgattattatgttagagattatagttcctgcaacaagtgctaatataggtccaggatttgattgtcttggaattgcgttaaatatatacaataaattttatgttgaagaaattgaaagtggtcttgaaatagaaggttgtgaagatgcttacaaaaacgaaaataacttagtttatacatctatgaagtacttttttgatagagttaaaccagaaaaaatacctgctggtatcaaaataaaaatccacagtgaagtacctatatgtagaggtcttggcagtagtgcctcttgtatagtagctggagttatagctgcaaatgctctatcaggtgctaatttagataaaaatcaattattaaatatagcttcagaaatagaaggtcacccagataatgttgctcctgctattttaggaaatatgatcgtatctgttactgataatgagaatatacattatgatattataaaaattcctgaagaacttaaattttgtgcaatgatacctaattttaagttatcaacagaaaaagctagaggtgttttaccaaaggaaataccatattctgatggggtattcaatgttagtagagttgctttactaatatctgccttactaaacaaaaactttgacctacttaaagtagcttgtcaagacaaattgcatcaaaattatagaggaactctaattgagaactacaatgatattgttgaaaaatctgaacaattaaatagtattggagtatttttaagtggagctggacctactataatgtctttaataaaagaaaatgatgatagttttgtggataatatgaaaaattacctacaaaaactaaaatctgattgggaaataaaagagttatgttgcgattctaatggagctgttttaaatataatataattatcgtcttctatacaaaatataactactcttttattataatttgtagtataataattaggactaggtaataatattaagtattataatctagttctttaaacatgtttacattgaggagggattatcataaaagagttaataattagagatttagttgcaaaagttcctataattcaaggtggaatgggcgttggtatatctaggtcatcactagctggtgcagttgctaagcttggtggtgttggtgtaatttctggagttcaaattggatatgatgaggaagattttgaaactaatactataaatgcaaatttaagagctataaaaaaacatatttctaaggccaaagaaatctcaaatggtggtattattggtattaattttatggtagctatgaaagaatatgaaacatacgtaaaggaagctgttaaagctggtgtagaccttataatatctggagctggattacctaataagctaccatcattagtaaagggaagtaatgtaaaaatagcacccatagtttcaactgcaaaagctgctaatgtaattttaaaaatgtgggatagaaaagagaaaactactgctgacttaatagttgttgaaggtccaaaagctggtggtcaccttggatactctaacgaggaacttgataacatagattctatagactatgataaggaatttgttgaaattttaaaggttgcaaatacttatggagaaaaatttggtagaaacataccagtagttgctgctggtggtataacttctagtagtgatgttaaaaaatatatagatatgggtgcaagtggtgtacaagttggtacaagatttgttgctacttacgaatgtgatgcccatgagaactttaaaatggcatacataaatgctagtgaagaagatgttcatatagttaaaagtcctgtaggtcttcctggacgcgccataagaaacaaatttatagaagaagttaaaataaatcgtccagaaataaagaagtgctataattgtttgattccttgtaatccaaaagaaactccttactgtatttctcaagctctaatcaatgcagttaaaggagatgttgaaaattcacttttattttgtggaaatgatgcctataaaattgataaattaagtactgttgaagatgttatcaatgaattgatttctgaattataatttaaagaaaactaaattaaaattttatcaagctaaggagttttaatacgttatttattaatctttataaacatatttatgtccttagcttttttgtgtcaatttccttttattgaaattttaatttaattagagatagtattaacccttataactaatcttcttttacaagtacattggttatttcagctatatataaagtatgataatctttttgtggataccatcttccatctataccttcagcaataaaacattggggttcaagtttctgactataaatttttttgcatataatagccattttagcttccttaaaataaggtgtatcatttaagtgttctatattaaatccaatctgtgatatcttatcctcttctctaccagatacctttccacaatatgaaagctctttacgaaaatcttcatcaaaaaatgtaagagaaaatttatctgtattatctataaattccttagtataacgctgtggtcttattactacaaaagcaacatcttttccccacataactccaagtcctccccagctagcagtcattgtattcactttaccttcattttctgctgttataagtgtccaatctttacctatcaatccaaatggattatttttaatctcttctgccaaaatttctttaaaatcactcatatctctaataacctctcattctcttatatttatattccttttattttcgtgataaattataaatgaagtctagttttgaaaataaaatacttttttaaatatattattgcaaataagtaaatatatatatacactcttattttttaatatatttaataatttcactcagaatatatatattctttactcaaattaaatataacttatatactttatgtgtaaattatggtaaaaatattatttaatcaaatcaaaacttgatttatatacctggaaaaggtattatattaaagagtgcttaaaatacgcatttcataaatagctatatataaaataataaataaggagagtgatgggcaatggatactagtccgttgcggagagaattttttacattttcatcacttaataatatctaaaatcaaaactaatacatatattcagttatataaattagttaattaatagatactattaaatgatgagatttatataaaactgaataaaggatgtgttgccatgataagatattacaaaactatagattcaaaattagagaaacttagtttttttgaagatggctgttggataaatcttgttgaacctaatcatagtgaaatcaacgaaatttctaatttattaaatatagatgtagaaagcatagaatctgcactagatgaagaagaacgctcaagaatagatgttgaagacaatcatactcttatacttatagatataccagtagacgaaagtgactctaattcttctcattatactacaatacccttaggtattatactaactgaagaagctattgtaacagtttgtgatgcacagactaagattttaaatgactttatagttggtcatattaaagatttttttacgtttaaaaagactcgctttttgcttcaaattcttcacaaaaatgcagcttattacttgcattacttaagaaaaataaataaaatgacaatcataatagagcgagaaatttacaaatcaatgaaaaacaaagaattggttcaattattggaattagaaaaatctttggtatacttctctacctcactaaaatctaatgaacttgttttaaacaaaatggttagaactgctggtataaagaagtatccagatgatgaagacctattagaagatgttatagttgaaaatagacaggctcttgatatggctaaaatatatggagatatattgagtagaattatggatgctttcagtgcaattataagtaataatcagaataatgttatgcaaattttaacagtagttacactaattttctcaatacctacaataatatcaggattctttggtatgaatgtcatcaacatgccattttctaataacccaaacggattttggataatacttcttattacctctataatatgtatagtgattacatttttcatgtcaagaaataagctattataaaatattaataaaaaagccattagaattaattgatttacatttatcctaatggcttttatatatttaaatctatataatcttataatactttttaactatcatgttcttcatctataatcatttcagtttcaagcccttctagcattgaatctaaactttcttttatatttagtatataaattggtacatactcttcttcatctattacctcttcttgcaacttaaatggaggaattaatacttcatcaaagtctatatttaaattgggaaagccttctactatctcttcacaattatcgtactcttcatttgctaaagaaatgtacatatctaggctctttttataataaagacctgcaagcatatactcacacttcttacttccatatttaataccttctttataatatttctcagcttctgcgtcatcatttaattttaaataaatttggcctaaattatatattgattcaacacaaccttgtgctctagccttttcataccaaaatttagaatttacataatctttatagaacatatcataaattaatcctaccatatgttgagcgtacacattattttcattggcaggtgtatcaaacatcattttagactcttccaatttaccttctctaaaataaattctacctagatgtatacgagcattcatatgatttttgctacttgccatttcaaaatactttctagcattttttgtatttcctaagctctcatatatacaccccaatctataactagacctcgtatctccattttcagatgctttcttataccaacttatggcttcttcaatattatttaaatcttcatagatatttcctaatttgatttgacaagatgcattatttggaatcctcgaataatacgaaatcgctttttctatatcttgattctgataatataaatccccaagattttcaagggaacttttgcatccaacagctatagcatcctcataatatttaatagcattttcataatctttttcttcaaaatatatacctgccagattattttttgcttctgttatatcatcttcagcagccattttataataagtttttgccttctctatctcattttctctattatataaattagcaagtctatacttagaaagtgtatgatttttttctattgctttctcataataataaattgcatctcccagctcttcttttctatcatatacatatgcaagcctatactcagacttcacatcatctctatcagcactctttttataatacttctctgcatcttctaaattatcatttatttccataatcatacccaagttaaagcaacctttcatatgacctgacttgtacaactgtttatataaacttactgttgatttattatctttcttttttccatttaatattgctaaattatattttgcatcatcatctaaaagcacagaaccttttttatagtattcatatgcttcatcatctttctccaaaaaagtatataatacccctaaattaaaacaagctttacctaaattcttgtctgctgctgtttttaaccatttttcacaccttacaaaatctttcattttaaaatggcatacacctaaattattttgtgcttgtaaataacctaaatttgctatcttttcataccaatatatagcatattcatagccatctaacttatagtacatattacctaaatcaaaagcagcatcttcacttccacttttatatgccattgaataccacttttctgcttctttaaattgttttttactttcatatatatttcctaaagtatattgagattttacgtaattatccaatgcagcactcttatacaactctattgcgctttccatcttacccatcttttcaaggagggcacccttagtatgtacgactttcaggtcattagatatattttttattttttttatagaaaattttgtatttttcattattcgctacctacccattttataaaatatattctctcaaacattattatacattataatctataattaatgctataatattgaatttttaccttttgtcactatattgtaacattaaattttaaattttataatcattagattttattatgtaattggtatataatgtatatatagggggggacattttatgaatttcagcaatatttttatccaagttgcagttttatttataattattttagttggatattttgtcagaaaattcaacttattagatgaccactgcacatctaagctttcaactttgacaatgacagtttttttaccatcaatgataattagctccatgcaaattaactttgatagtaaaatgatacaaaaaatactattgttattatttacatctttgattatgtatatagtttcaattataattgcatttttattgaaatacattttaaaatgtaatgataaaaaagatttgggaatatatcagtatatagttgttttttcaaatgttgcttttatgggttatcctgtaattgaagcagttttaggtcatgaagcaatattctatactgcaatattcaatttgccttttaacttattttctttcactttaggaatttatcttttatctaaaggcagtacaagtagaggtttttcaataaaatcacttataagccctgctacaatagctattgttattggactttttttatttgtaacaggacttaggttaccccaatttataaacgagccacttgagatgttgggaagtataactacaccaatatccatgattatcattggaagcttacttgctaattcttcagctctcgattgttttgtcaacaaaaaattatatatagtcacttttataagattattggtacttcctgtgattgtgtattttattctaaaaggatggataaatgataagatgattttagctataccagtagtaatttcttcaatgcctgctgctgcaaatactgctataatggctaatcaatatgactccaatataacactagcttcacaatgtgtgttttttacaacactattttcagttatatctataccttttataagtattttactcttatcttgatttatttttttatgtattatataataacatattcaataaattacaaatataaacattttattgtagtatattgatggaattttttcctagatatttgtcaataatatctatatgtattatagaataggaggcttaaatatggatatggatttactctttaaaatagtatttgctatagttgctataggtgtttctgtaaaaatcattaaaactgttgctagtttagcttttaaaatagcgttgatattgctaataattttatttgtatatagaatgtttttgtaaacatttaaaaataagttttttaatacaatagagaagtaaaatagattatttttaatgtaaattttttattaaagacactctattttacttctctattagcttctttaaattaaatttttattatatcttcccataatataaacatcttcaaattttccatctctgattacagcatattttttagttccctctatttcaaaacctagttttttatataaatttaatcccttttcattatctacaattacttctaatcctactctagttaacataatccaattatctgctatatctaaaagttgttccataagcttcttacctactcctcttccctgataattctctgcaacacttattcctatttctgcactatgtctcaatcgtggagaagaatttacatgtaacccagcaaaacctattacatctttttctccattattattagtttcagctacaaacatataatcattttctcccaaagaagctaacatagcttcagttttatcgactctgtcactcattaatgccaaagtatttctcataacactgtatgttcttctaatttcattaaaagcttgtgcatcttctcttcttataggtcttattgttatatctataggcttactcatattggattccccctcaaacataatctttatttttaattaaaattttacatctttattttatactgttcaaatctatgtatgcttctacctgaggtacatatatcatattatcttttatatgtgtacttccaaattcttttaattctgtaccttctttatccttagttattttatatctaatggattccataccttcaactacttcagcatgaaaaaacataccttcatattgtttaaatctaaaattaaaattgtctttagtaagttttattatcatatttttatctactccttatataattgatatttttcttattattagttgtatatatactgcttattcatattaatatattataacttatcatttatttagtataaagttataaatagatatatttatacttattttacaatctttcttcaattgatatataatatgtttatataaactaatgtatgtgaggtgaaatatgagcaaaaaaacaaaatatttttctttaattctctttcctattgctttacttttaaattttatagccagcaaagttccaaatattgttgaaaaatattactcccaattcatagataaaataattgtacaaatattgagtaaagtttctggaattttcccattttctctctatgagattacaatgtacataatagttatatctatcttcttatttttatgttgtactttatctacaatttttaataagaaaaaaaattaaacatatttttaaaaaattccattttaaatatattatccattgtatcaatagtctactttctttttgtagtgctttggggaataaactataataggattccactagaaaccacacttataaataactataatttaaaaaacaatacctctatccaatcaaaacaatatagtgttaaagagcttactaaattatataaattccttgtaattaaagcaaatgaaactagaaaactcacattacaagataaaaatggtattgtaaaatctaatacagattataatggtgtcataaatagagctcaactaggatacgataatatcttggatatattacctagtgttagtggtagttattctaagcctaagtatattatttcatcaaatctaatgtgctatacaggaataactggtatatactttccttttacaggtgaggcaaatgtaaatatagcaatacctgacttatatattccttgtacagttgaacatgaaatagcacatcaaaggggatttgctagtgaagatgaggctaattttatagcgtatcttacttctataaaacacccccatattgattttaactattctggatatattttagctttaaattatactgcttctgctttaagtaaggttgattataatgcatatgttgatatttctgctggcatttcagattctgtccgtagagatttaaaaaatgaaagtgaattttggcaaaaatatgaaggtaaaattaatgaaatttctaatgagtttaacaattcttacttaaaagctaatggcgttactgaaggtactcagagttatggtaaaatggttgatttattgctaacttattatgaattatatccatataactaaacactacaattcaaaattttattcatatacagctgatattaaatcagctgttttctatttaaataaattatttaacttcaagcaatcttatataatttgatagtacttatactatctgtataacatttcaattctaactattttagttaaaacatttctattatcttttttaataaatgttttaactaaaatttttaaaacataaaacttccacattatttcactatctatataaaaatctaaaaattcacatataaaattacataactaaaaaatcataaatttatagaaaacatatattcaaaataaaaaagcatgtatcaaaacttgacacatgcttttttattttgaatatataccattttgtcacaataaaaatttccttgtaacactgatatttttaaacaaaatagtccttatttaattaaattaacattaattaaattcgtactcattttgctatcattaaacattacttatagtaattttctaatacactatttgaaacttccttcccttgaaaacttttcaaccaattctcatatgctgaatttttccatatactaccatcattaaatgttacttgttttacacaagatataatgtactttacaccatgctctccagttgattgtttccatttatcaaacaatagaaaggcatcattttgattcttacctggtgctattgcattttgctttgcatattctttctccatttgtttccattctttcaaccaattttctacccatgccttgccttgttgtttttcaaacatacttattatatcctgtggtggtgattgttgcatttttctataagtatgtgaatatgattttggagacacaggagatatgcctgtaacaataccatagtctacaccagctgggctaaatccaacacttcctacttcgccatctgctgccacattttgagcatcccaatatagctcaagtggttttccatttttatcatatgctaagcatgtaatctcataatccataattgccttttcactgctatttgttaagcttataacattgctaggccaatgatatggagtatcatcatactgtattttgctattatttataaataatggaatattctcattataaacaagacctttactactttgaatatcggatactttctttgtgacagtacttaccgtacttgctaagtatacatttgttttttctgaattggtcgtactaagagaaaatgttgttgtcgttccagtaatcagcaaagcaacaactaaaataggtaagctagatatttttttatatctcacagttcttcacctctttttctattaacttataataaaacaatttaccaaaacattaaaatctatgttaacataatttaccaactgttctagtaactatatcctatcatagttactatcaagtttcaatactattgatggaaattttcactatattaaatctttttttaattttataaatttacaatatgatttaactcatacatatatagtcaaattagaatataagtttcttacatttaatgaagtttataaaataaaaaatgactagataattaaatactgtaaataaaaacttattacaaaagtatttaaaaatctagtcaattaatatatatatgaattgtatactataatttttcaatctcttctagcaactcatcaactaatttgttaccatcaatcattctaactatttcaccctttttaaataaaagaccttcacctttacccccagcaatacctatatctgcttctctggcttcaccaggtccatttacagcacagcccataattgcaacagtgatatttttttccatactaccaatcttttcttcaacctcatttacaacactaattaagtctatattacatctaccacatgtagggcatgatataactttaatcttatcatttaaaagtcccaaacttcttaaaatctgtttaccaacaataacctcttcaacagggtcgcctgttaaagatattctaacagtatctccaattcctttaagaagaagtgctcctacccctatagaagactttattgttcctttgtgaacacttccagattctgtaattccaatatgaagaggataatcaactttttttgatattaattcatatgcatcaacagttttataaatatcggatgattttagagatataactatattatgaaaatctaagtcttcaagaatcttaatatgtcccattgcactttcaactaatgcttcagcagttgcagagccatgcttttttaaaagttctttctctaaagaacctccattgactccaattctaatttttaaatttctttccttacatttctcaactaccatcttaactctctctctacttccaatattaccaggatttattcttattccatccacaccttgttctatagcttcaagggctagcttataatcgaaatgtatatctgcaataattggtatatttacactagactttatctttgctatattcttagcagctttaatatcaggaacagcaactctaactatatcacaaccagcttcctctagtctctttatttgagctattgtagcatctgcatctcttgtatcagtatttgtcatagattgtatacttataggattttctcctcctatttttacagttcctacacttacttctctcgtctttcttctctcgtaactcatattccacctctatatattattttatattgaatctctttaaatagtaaaatattataacctacatgtatattataaattaaaaagctatctagttaaataagaataaatttcatacataaaaattaatttattcttatttaaaactacatagcctattttcttaaaatctctaaaaaactaaatcattgaaataatcttaatatatctttatatgtgataaaaagcataaataacattaaagctccaaaaccaacaacatttatcatgccttctttgtttgggtcgagttttttaccacctctaacagcttctagtaatagcataagtattctccatccatcaagtgctggtattggtaatagatttactatacctaaatttaagcttatgacagctgctaaatacactacatttatgatgcctgtacgagcagcatctgataccataccaataacacctactggtcctgctacagcattgccaatccctcctggtacacgtcctgtaatcatttgacctagaaatgttaacatctgttttgtcatatctacagtagttttacatgcatttactattgacgccaaaaagtctttttctctttgtggttgaatccctatttcatactttccattgttatttttaggtgttacatttacaactttattacttccatctctagttatactaagttttaattctccaccagaagaagtgtttattatatttgcaacttcatcccaagtcttaacagaattaccattaattttatttatcttatctcctacttgaagccctacagcctgtgcaggagtatctggcattatctttcctaatttagtcgttggagaacctatatacaaaaatactggaactaaaagtattgctgctaatattatattgaatattggtcctgctacaatagtactaaatctttgtaatatagacttgtttccaaaagaatttggacttatttgttcttcatcttcaccttccatgctgacatatccaccaattggaagtgctcttatagaatactctgtatctttttttacactatatatcttaggccccatacctatagaaaactcatttactttgataccacttctttttgcaaatataaaatgtcctaactcatgtattaatacaattatactaaatagtattaatgcggctattatagtcataaattcaccttcctatttttttatcagatttgcaacataagctctactccatctatctgtttctaagatttcttctaatgttggttcgcttatgctactatgaacttctaaagtcttctctatgtaatatggtatgtcataaaaaccaattttatcctctaaaaattcacttactaaaacttcatttgctgaatttaaaacagaagaataagttcctcccatttttaaacactcataggccaattttaaacatggaaaagtttctaaatctggttcttcaaaagttaaagtactaaattttgaaaaattcattctttcaaagctactttccattctatctggatatgtaagagcatactgtattggtagtctcatatctggacaccctaattgagcaattattgagctatctgcatactgcaccattgaatgaattatgctttgtgggtgaactactacatctatattttcttgttctaccctaaacaaccatctagcttctatcacttcaagtcctttattcataagcgttgaagaatcaatacttatttttcttcccatactccaatttggatgcttcaaagcttcatttttagttatatttacaagttctccctttttctttcctctaaatggaccaccagatgctgtaagtattatcttttctatattttttttattttctccatttagacattgaaatatagcactatgttcactatcaacaggaagaatatttacattgtatttttctgcttctttcattacaagttcaccagcagttaccaacgtttctttattcgctaatgctatgtctattcccttctttatagcacaaagagttgggactaatcctatcatacctactacagcagttaaaaggacatccacttcatcaagtgatgatattatttttaatccttccattcctgctaaaacttctatttctatatttttaggcaacatttcttttaatttcaatgccttattttcctcaaaaactgttacatatttaggtttaaactctactatttgttctagcaataattcaatattactgttagctgatattgcaactatctcaaacttatctctatgttctctaaccacatccaaagtttgtttacctatagagcctgtagaacctaaaattgatatctttttcatataataatcctttctaataataaatataccctgtcaaaacattataacactactaaaacaattatttttactattcatagaaatttcatatattattccacagattaaaattaatctattattttttgtatcttgtggaatattataaaatattctagtattattaaatgcccttttttatttccacaacatcttctattttacagtctagtgctaaacatatcttctccattgtatccatagaaacagatttatcatttcctagtctgcctaaaacagaaatacttatacctgatatatttacaaattccattttctttatttttctgtcaattaacaatttccataatggagcgtatgaaatcatgttatcacctcgcaaaatatattctatcacattttatctattttggaaaattttcatctatttagataaataattatttatctaaatagatttcaattatagtttattaaatataaatatgttaaaataaaacaaaaccataagttcaaaaattaagctttatatatatttatctcattattttactaaaacataactatataaaaaatatttactattatatatctatttaaaacacatcattatagtatcatataaacatatgtaaatatataattaaaaaagctaaaaattagtaaatttataaaaattatattttgaataaaaggagaaagaatgttgtatttattaaaaattaatcaatttgaaagaagctatgatataggaatttttaaaaatgaacaatcaatatataaatttattgaaaaaataccctttgtaaaaaaagataatagtaattttaattatacaaattactatatggaatttgaagatattcctgaatattatgaagtaaatttcaataattatttatatattattaccaggttttcattcattccagatggaactgagatattttttacttgggaagaaatccattattgggatgaaaaagttgctaccgagaaaacttttataaatggcgaaacattagtggattcatataactttccaaataatgaagtgaaagactacatacaaaagcgagaatcattatatatagaaacaaaaaaatattatgaagaaaaaggattaaaaattgagagacatgcactcggttcagaagatggtgaatatgttgaacttacaaatgattctatactttatttactagatatagaagcagttgaaataagagaacaatcaaaaaatatagaagaatttctatataagtacaaaaaacgttttaaataatttatattttaaaatacataacaatacattgagtcatttaacgaaatataaaatgactcaatgtatagactgataaaaataattatattattttttagttacatatttgttaaaaaattctttttcttctatcggtttagagaaataaaacccttgtcctacatcacatttaactgtatttaaaaattccaagtcttttttagtttcaataccttcacatacaacagacatgcctatacgatgtgacatttcaataatacactgaataatactatatactttctcccggttaaatgtttctttaagtaagcttttatctaacttcaatccattaatagatagagaacataaaagacttaatgaagagtatcctgatccaaaatcatccatcgaaattaaaaatcctaactttttaagctcctctaaaatcgaaataactggttgagatatttcattaaaagcactttcagttacctctatctctatatacttaaaaggaatttcatattctttaacagtatctaaaaacctttgataaaagctattttggtaaatagtaacccttgaaaaattaactgcaatcggatatgtatattgattttttttcataaacgttttttttacaaatgaacacgctttttttaacatataaaagtccaattcaataataaatccacttttttcaaacaatggaataaattcatctggtgataaaaaaccaagttctggagaaaaccatcttacaagagcttctgcgcttacaacatttaaagaagatatttgaaatttaggttgcaaatacatatgaaattcttcattttctatcgctttatacatataattataaatactattttccatttgtaactgttttaacagattttcattataccatactgtggaggaaattcctcttgttttacttaccttgtgtgcaatatttgccttatccattatagaattgatggatttataacctaaattatcaatttcaactaagtacgctcctatacaataagatatagtttgagttacattcatatctaattcagagattatagcattagttagcatttcccgaatatcctctaaaagagaatctctatattttgcaagtattacaaaattatctgaaccaattcttgcacaagtttctttgatattaaaagttttagaaagtgcagctgcaactattattagaactttatctccatattcatatccatgtgtatcattaatatatttaaaattgtcaatatcaatatttagcagtacatactctttgttagatgcattgtacaaaatttcaatcgctctgttttcaaatgcaacctgattttttatttttgttaaattatcagtataaaatattcttttaaacctttttttattataatattcccaaattaaaagacttattgttgagaatataagataaataaatagtgcagtagcaaaagaatacaattttgcattagagtgtttttcagatataaaaacaatttgattagacaacacagaatactcttcactcaatttatataatttatcacctgaagcaccatttctaacttttataatttctttcttcatagattcccacatagaatccatttgatttagtttttgttgaaattctttattatcacatctttgaaatccattttctccattacctgttcttagctttatcagaatattatccagtcgttttatcaagtcatcatttctttcattattcaattcttgcttaacaaccttttgagtttcactgcgaatagtaccagtgtgacttataattttaatatgctctatactatgatatagagaaaatataaaaaaaataataataactagccaaatagcagaataaattaaaaaatcatattttttcttcattattgttacctcatttgtaatatatataatttgcaaataatcaatctcttataaaaaatgattatcaatattttacagtgatatgtatttatcttaagtagtttaatcatttataccctataaattatacaaattcatcacctccaacacaaacagcaatatacgtttttctaaaatttctttttaaacattcatcaacactatcattaaatcatttttaaattgctcaattaatttactgcatcacttcttttcttataaaatatcaccccaataatatatttgtataatgtctttatgtctctttttaaatttggcatatacataatctatattttaataaataattaaaatactatttacctacaatttaactctttgaatttattttatcatattatgtaaatatattccttttttttggtatattacttaaattatatctatttttgtgcaataagaccaataatttacttatttcttattaattatatttaaaaataaaatttataaatggataataaattagttacatttatacatatatattataaatatataataaagctaaaaatatcgaaattattaaacaaaaaaatattttttaatgatagttatagtataaaaaatatactcactacaaatatagtatactattataaagtaatacttattcttataaaattccccaaggtcttctaaatttttgaacaatgaaaatagccatgtaactaataactgcagaatatctctgcatttaaaagttacatagctattttcattactagcaattatagattgctcttttaaatccaaccaatctttatctaataaaaaatttaatcgcactatatacaaaaggtgcaactaatataacactatcaaatctatctaatatacccccatgaccaggtattatctttccataatcctttatccctacatatctctttatagaagatgcaaataaatctcctaattgagctattacacttcctatacttcctattatcgctaattgaagcaaatcaatgccaaataaatatccaaataaaatacaacaaagtgtacttcctattattcctccaatagctccttctatagtctttttaggactaactttaggaattagcttatgttttccaagtaaataaccactaaaatatgcaaatatatctgtcataaaagatatcacaaatataagccatacatatatactacctttttcaaatccatttatagttataattataaaatctaaaaatactcctatataaaaaactcctaaaaacgtaatcgaaacatctataacattgtttttgcccatcaacatataaattatacttgctaaaaataaaataaaaattactgcataagtatattctaatggtaaattaaaaatattttttacagctaaataaatagaaaataaatatcctataatgaatattggatgtacatcttttattttaaatgccttataaaactcatgcaatgcaatataaactattgctgtctcagctatatatagaggaatacctccatatacaacaaatagaaataatggaaccagagctagtgaagcaataattcttgtaagcataaaataatctccttacttaagtcctccaaatcttctatcccttctttgatatacgtatatagccttctgtagttcttcttttttaaaatcaggccaatgtatatcagtaaagtaaaactcagaataagcaacttcccaaagtaaaaagttactcaatctttgttcaccacttgttcttattaccaagtctggatctggtatagactttgtgcttaaatagttttttataatatcttcatcaatattgtttatatctattttaccactttcacaattttttactatatctataagagcattttttatatctgctctacttccgtagtttaatgctaaatttaagttaactcctgtattgttttttgtcagttccttagctgagtttaattctcttatacaagtttttggtaaagcacttatatctcctatagcagttacttttacattgttttggtgaagttcagctatttcatttcttaagtatgtagataataagttcataagtgtgtcaacttcaagtttcggtcttttccagttttctgttgaaaatgcatataatgttaagtgcttaacacctaattttgagcattcttttactatatctcttatagtttctactccagccttatgtcctgcagttcttggaagaaatctagcttttgcccatcttccatttccatccattataatagcaatatgagtaggtatgttatttaagtctatatcatatataatgttgttattcatattttgcctccaatattgttctgactccttaaactaaggagtcagaaaagtatgtgattatcagttctacactatcacctatctcagatatttttataactctaggaactacaagtttttctttatcctttttaccttcaatagattttacggtataatttatattttgctcatcaaaatattgttttacctcatctacatgaagacctaaaaggttataatattttttcaatattatacctccattatgtccttttcttttttagataataatgtatctatttcttttataaatttatcagtcattttttgaacttcatcttgtgctttttttaattcatcttcagttaattctccgcctttttccatctttttaattttctcattggcgtctcttctttcatttcttattctaactttaaattcttctgcagctttactagcttttttagctaattcttttcttctttcttctgttaaagcaggtacagaaagtcttataacctcaccatcgtttgatggatttaatcctaagtctgagttagctatcgctttttctatttcatgcatagcagatttatcccaaggagatatcattaatattcttggttctggtacagatatagcacctatttgatttattggagttggagttccataataatcaactcttattttgtctagcatttgtgcattagctcttcctgctcttatagttccaaattcaaactttaaagcatcaattgtcccattcattttctcttctaattgcttatgtatttccagtttcataattttactcctccttcattcttcattattttacagtagttcctatattttcgccttttactgctcttattatattctctgttgtaagctcaaatacctttattggaattttattatccatacataaagatgtagctgtagaatccattacttttaattctttctgtataacttccatgtaacttaattctgtaaatttcttagcatctgcatgtacttttggatccttgtcatatactgcatcaacatttttagctagcaatataacttctgcttccatctcagcagcacgtaaagcagcagttgtatctgttgtaaagtaagggtttcctgttcctgcaccaaatataacaactctttccttttctaagtgtctaactgctcttcttcttatatatggttctgcaatttgtctcatgtctatagcagtttgaactcttgtagcaacatctatattttctagtgcatcctgtagcgccattgcattcataactgtagctaacattcctatatagtcagcagtagttctatccattccttcactggttctgcctctccagaagtttcctccacctactactacagctacttcaacacctatttcttgtattttttttatagcaatagcaatatcattaactacatcattatttataccaaaacctctttctcctgctaatgcttctccacttaattttaacaatacccttttgtacattggtttatccatcagaaacctcctatttcaatccttcatatccaattttttctattttttaaaaaagagaacacctgcgtgttctctctttggttattacttaagttgcttagcaacttcttctgcaaagttttcttctctcttttgtataccttcaccaacttcgaatctcacaactttaacaacttttatatcagaacctactgccttagcaacatcagcaactaattgtttaacagttatatctggatttttaacgaaagtttgctctaataaacaaacctcttttaattctttttctaatcttcctttaaccattttttcaactatattagctggttttccttcatttaaagcttgttgagttaatacttctgtttcatgtgctatgtattcagcatctacttcatctcttgaaacatacttaggattcatagcagcaacttgcatagctacatctttacctaattctaaaactttagcatctctagcttctgtttccatttcaacaagaacacctatttttccaccaccgtgaatgtatccagcaacttgtccattagttacaactttagcaaatcttctaaagtctaatttctcacctatttttgcaactctattatttaaaacttcttgtaaagttattccctctttatgagtttcacctaataaagaagctatatcttctttatcagtagctaatgccatacaagcagcatctttaacgaacactttgaagtcttcgtttttagcaacgaaatctgtctctgagttaacttctaccatagaagcaactgtattatcatcattcatttctattgcaactagaccttcagcagcaactctaccagcttttttagcagcttttgataatcctttttctcttaataaatctactgctttttccatgtttccttcagcttcttgtaaagctttcttgcagtccatcattcctgcgcctgtactttctcttaactcttttaccatttgagcagttatattagccattttttaagtttcctcctacttattctattccatattataaatggtaagggcgacccttaccatttaattgtcaaattattattcttggtcttcagctacttcttcctcagcaccttgtctaccttcaattacagctgttgccatagcaccagttattaattttacggctcttatagcgtcatcatttcctggtatagcaaagtctaattgttctgggtcacagttagtatcaactataccaactactggtatacctaatctatgagcttcttgaatagctatgttttcttttcttgggtcaactacgaacattgcacctggtaattcaggcatgtcttttattccacctaagtatttttctagtttttctttttcagctcttaattttataacttcttttttaggaagaacattaaatacgccttcttcttccattttttctaattctcttaatttatttattcttgtttttatagttttgtggtttgttaacattccacctaaccatctttcattaacaaagtacattccacatctttcagcttcatcttttatcgcatcttgagcttgttttttagttcctacgaataagattggctttcctgtttcagctacttctttagtgaacttgtaagcttcttcaacttttttaactgttttttgtaagtcgattatatatattccatttctctctgtgaatatatacttagccattttagggttccatcttcttgtttggtgaccaaagtgaacacctgcttctaataattgtttcattgatattactgacatatcttacctcctggttttatacctccagcttgatcttctccctaaaaaaccatgtaataggcaccttttaaggatcccaatgctgtgtgtgatttattttattttttcacctctagtagtatatcacagaggcgaagaaataacaatattttttccatattttctatttttatatttttttgtgtattttataccattttttgaatttaatttgcaaatttcatttttaattttgtttttaatgatacgttatctatactattattacttactatatctacacttccaagtaagtcacctgaactagtataatattttataacacccatagtatcaccttttttaacagggtactctatatttttaatcttaacttctgattttatactttcatcatcttttaatattgtataaagttcatcttttgcttttaatgtaacctctaactctttcattccttttatatatttcttaccaataaagctatctttatcaattacttttttcatattgaaattttcttttccatatttcagtagagctaatgaagcagaggttcttttatttttatggttagtacctaatacaacccctattactctacgttttttctcatttttctcatttttatttacaaccatagaaaatgataagcaatatccagcattgccagtatatccagtttttataccatctacttctggtataattcttaataatgcatttgtattgcttttttcaaaacttctatctgaatttgtatatgtctccatatcagttatagctgttacttgtttttcataatggtcaaacatgtattttccaagaatagctatatcttttgcagtagagatattttcttttgctggttttttggggttgcttaaatcgtatattggaagaccatttggatttagaaaatgtgtattactcattcctatttcttttgcttttttattcattctatctacaaatgcttctttcgttttacaaatatgttttgctatagcaattgccgcatcatttcctgatacaatcataagacctctcataagctctataagtggcacttcttcaccatctttaagtttataacttgacccttttactgatgcaatagatttgtctatttttaccttatcagtttcttttacttctttattttcaatagcttctattgcaagtaaaaaagtcatcatcttacttaaactagctaatggtaccttcatatcaggttctttactatataaaactctacctgtttcttggtctataagtatagatgtttttgaatacttgtctacagatttaccatctgcatatgaataatttggtattataaaaactagaatcatggctaatgatataattttttttagtgcatttttcaaatttttcaccttcttggattattaagtatatttatatttaaattttccctatttggtccaatttatatctagtaattaatacctatccatatttacacaaatattaccttatcattcttttaataatcacagatgcccaaattgctcctattgtaactccaaaaaatacttctatacctgccaatgctttcccaatcaaacttgtagcaaccatatctccatatcctactgtactaaatgtagccatgctaaaataccataaatccatatacattttgaaaatctcacttagtgagtaatcacctatattgtttatatctaaagctacaagtgtgctatttgaactttctatgcctacaaataagtataataaagcaaaaacacttattattgctataatcactaataatatattccatggcttttctccataacctgttgtgtaacgtgctatttggtcaaaaaatttttcaactaaataatcactgaaagtaggataattagaacgtttcattattttactactataaattctttccttataatagtaaaatcctatcatctcatattctccaatttttgttgcttgatttctagctattctataatttatcttgccatgctcatactcactttttccatattcaacattctttaacacaaattttgtacacatgctaaaaattattccatccattcgtggaaaattttctactttattaactaccaaatcaggtcctttaaatttcactttttcaaatatacggtcatttatatagtttttactaaatatggttctattaaaatcacagttttctaagaatatacaaccattaaataaaactttatctctaaattctgtatagttaaaaataatattctttttaaaaatatattttttaaaatttgctttttgtttaaatatggattcagaaaaatccagtattttataattgtaagttaatatttcttccgcattaaattcattttcaaaaacaaatccattaaattcacttatctcttctttatgaatagtatccatcatcaactgtatctcttcatcagacttattttctttatgaaagatacaatatccagaagaatctgcttctctatgacatttttttctctcatctatcttagatatccatttacaattcataaatatatatcctccagtacaaaacaattattactattttgtattagtttggatattattttattttatatacttaaatagttacaaaatatatattagattcttagttttaaatttttaatctacttcattgtgcttttaatttgtttcatataaaaaataataaattttatatactttgatttatttatatattaaatattattctaaaacttacttatcatttttaagtaattttgtaactatatttaatgctactaaatcatccataaatcctattgggaacacgaagtctggaatcacatctgttgatataacaaagtaaagtagcatacttccaatcaataaatatttctttattgtaagtccatctgtacaaaaatcagcatacatttgtcttaatctatctgtaaattgaccttgtttttcaatagaatctatttttttattaaaattatcaaaaagtaattttttaccttcatctgtttggacatataacttacacttacttaactctttttcaatatttccattaaagttcttatcattgattaaatttgcaaatccaagaatatcatcaaagttactaaaatcactatctgcattaaatatttgattattgctgtttctaaattcatatcctgaagctttcaacagttcttctaggttaatatttaaatgtattgccatcttttctaaatgatttatatttggcctttgtttattattagctatacgagatatagtagatttatcaattccactttttttacttagttctcccattgataattctttttcatctaataaaactttcaacaaatcaccgaaattcccaaccttactatgttgttccattattttcacctgctttattatgattggttttatattatatgatatgattcttttgttatttaggtgttgtatgatgttgaaattttatcaacaatttattggattatctgtaacaatttatccatttttacaatactataactaatataagtacaaaatttaagagaaaggatgttaatctactgtgattgaatcaattttattagttacttctctttgtatagatgcctttgtgacaagctttggatatggagtaaataaagttaaagttcccttatattcaaatataattatcagcgtagtttgttcagctattttagcaatatcgctttttgcaggtacaatagttagagattttttacctcaaaatataacaatgttaatatgtttctttattttatttttattaggaagtgctagactaattgaaagtttttttaaatcttattttaagaaaaaatctatacactcaaagaattataattttaatatgttagaccttgaattaaattttaatgtaagtatcgaacctgatgtcttagatacaagtaaatctaaagtgcttaaatctgctgaagcatttacacttgcacttgctttaagtttagatggattagctatcggttttggtagtggccttgtaggtgtgaattatatacaagttattctattttctttaatatcaaatataattgcagtattacttggttgtttactaggaaatatgtttgttaaaaacgtaaatttaaacttatcttggttaagtggtttaatcttgttagtcattggatttatgaagatatgttaataagaaagcaatctaaagataaacttttctctttagattgctttcttttgtgctttttatatttattttctattctctctaatttctttctgaatctttttaagagctttttttgaacctctttgaatatctttttctaattttctttctttaaaactagtaaataatacatctaaatcatacccttctggatacaattctgatgcttttatgctaagttgtaatctttttatatttactgaaataaaattatcattaaacaatacttctacattattaaacttgtccataggcttatatacaattccaaaatcatcttcatctagtaattttaccttatcccctacattataatctgtatagcttaaaatgacttcagaactatttttatcttcaatattagattgtagcttacttcttttaactaaatctaaattgtagtttctatcaattacatattctttagctctatctaaaactctattttttattcccatttttttagaaataaaaagagcattactatcttcagattttccaatagttaacttatacaatggttctaacgtttctttatcaaacatcataccagcattttcaaattctggatgtaatgtagcaaacttttttatctctccataatgagttgatgctatagttatacatcccattttgtaaaactcttctaataatgatattgctaaaccagctccttcattaggttcagttccacttcctatttcatcaaacagaacaagagtagaattatttgataaactcataatctctgcaatattttttatatgtgatgaaaaagtacttaaggcattttcaatactttgattatcccctatatctacaaaaactttttcaaatacactaaattcactaccttcttttgcagaaatatcaaatccacattgaaccattaaagttagtaaaccaacagtcttaagggttacagtttttcctcctgcattaggacctgttattataagacttctataatttttgcctatttcaaaatctaaaggtactgcatctcctgttagaagtggatgtttacctttaattatttttatatagccattattatttatttttggagtaattccttttattttttgactatacttagcttttgcaaataccatatcgtattctgaaagtatctctatatttaattttatctgacttatcttctcaaatataagttctgttaaataagataatattttgtattcttcaatagtttcatcagcttttagcatagttaactctgtacttaaatttgaaacactaataggttcaataaatacagtatttccttttgatgatgtatctaatatagtaccattaacttcatttttataagaagatttaattggtattacatatctatcatttcttttacttattataaactcttgtatatactttttatttacagttgatgttataaatttatttaatctatcttttatctttccttctgtaatttctatatttcgtcttatcttttttaattctttactagcattagaatcaactttattagattttatacagtaatttatctcatcttctatacttttacattctgttatatttaaagcataagaacttaatgtaggtgaataaaattctttttctaacataaaagctttcatcttcctacaacctcttaaaaaatcttcaatatttacaagttcaacaggttctattatcattcctttttcaattttatctattgtagaacctgcattaaacaatccttcaagtggtatgtgattactattttcaattatctttctagcttctttattttctgctaatttccttcttactactccaatattcccactaggagttaatttatctattaaattttttcctagcgaacttacacaatgtatttttattaagtctttaacttcatttagttgcaatctttcaaatgtattactattcattattttttctcctttatttataagtcatcgtcttttaaatcaccctatcatttactttgataatagttattttgcgaacaacttaataaataaggagttattatatatcaaactccttatttattaagaagtttaactccggactcattaatgttagtattttttttcataaaacacttctccttttctattcttatttaaacacttataccagtgcttctaatattattccataaattatatatttatgtcaataaaaataatgttattaatgtttttgtacagtgaaaatttttatagtgaaaataagcttatactttcatttatattttggaattacttatattgtcatcaattcatgtatgtgtagtttccaatacaatctaactttgtaatcattatatatcaaagaatttagctctataaattatcgtctctataaaataaaaaaatagctaataataataaaacacttttaaatgttccataaaattagctatttataatataattttaatcttttttaactttaaaaattatcctttataagtaatcaatggcttcatagttgccactacttgaataagttcatattctatcaaactttcaataatctgctctatattcttatatgcctctggagcttcttgaaataataaatttacatcattacatataatctgacttttaaatttagtttgttttatagtatctttactatacttacttttaaggcgcgatttacaaactgaacgagaccattttctacctgctccatgtgatagagaatataaagatatctctgtattttcagtaggcataactatatatgatagactgcctcttgaacctggtataatcacagctcctctttcacttgaaacagcaccttttctatgtataaatttatcttcccttttctctataaagttatgatttatagagaatattgtttcaacatcttcagatgtacctattgactgcataatttttttactgatagcttcacgattacgctctgcccacattaaagcattatcatgttttttaatataatctattgctttctcactttcaacttcaagtccatctttatcataaaatttttttaaaatatcttctccataatttcttgacccacagtgaactaacatcataatatcatcagatgaaaattttaattgttcaaattgttctttattataaatttcacttatacattgaatttctacaaaatgatttccactccctatagttcctaaatttaaaattggacattcttctttatatgtgttttttatttctatatcggacaaatctttaatcttactaagtgacttaatccatttgtcttttttaaatttcttttttagaaccccagttttaaataaagtcattccgcatcctatatcatttccaattatatgtggataaataatatttttagtctcaactgctaaacctacaggtattttacctgtatgtaagtcaggtaatcctactactcttaaaattccatttaactttgaaatatcttctagttgtttccttgctatatcttcaatccaacatttattacttgctattatttttatattgctcataatttgctcctttttaatattctcctgcctttaaaaagtagcaaaaagctgtgacctttagccacagcttttttattctaaactgtaaaagcaggtggctatttgttaaaatactcctagacgtttaatacctcattattttttgttaacataataaccacttcctttcataatttaagactacactaaaatttctatgtatatcatttatagacattgattttaaaatacttaatatacaatttttatattatggaactaataataatcattgaaatcatgactatagctagaccggcaacaacaagttttttatgtaatttttttctcattttacttttatattcttttttaacttgtataactttgtcttgtttctgttcttcttctttctcatcttcaacttctatatatgctttttcatacattactttacttaaatcaataataatatcattggctctagtatacttattatttcttccaagaagcctttttataacatttataagttctgtatttccattaattgcttttatactattccaatctaatcccttatcaatagattgtagcattttttcttctgaatttgattctccaaaaggcaattttttaaatatagattcaaatagaataagacctgttgcaaaaaaatcactttctttatcagtataatttatacatagttgatgtgggcataaatatctcctgtttccatagcttcttgtattaaccccattatttgcttttgtaattccaaaatcacaaatttttatattgtattctgtatctactattatactactcgattttaaactaccatgatatgaatgattcctatgtatcatttctaaagcttttaaaacttgtatcattatgtttacaattgcttctaaatgaagataattacctagaattaattcatctagtccgataccattaaagtcttcacttacaacataatataatgttgtttcttctgtacagtgaatcccaacatctattatttttagtatataaggagagtttatctcatctaaagcagtactttcatcaattaaatttgaaacaaaatcttcacaaatataattattgtgctttataacttttattaacacatttctcctgtaaaaaacatctctagctttatagattttgttaatttctaaaacgtcatcagaatttactacctcatatctattgcctataaaattcaaccatgtcacctcctcatacattttatataactaaatctatttacaattataccaatatataggaatattttctatatattaatgattgtaatattaaaacaagaactaatagtgttaatttttacaaaaaaggctgtctcaaaatagagatacgcttcttttgtattgttgaaatgatgaaaatatatttgatttcacataaaaagagtgtctcataaactaaaaagttcattttgagacactcccttttatattacaaatatttctctaaaaaattatctatttttttaattctttataagaactatttgatatatgttctttttttatgacctttccacttgaatctttaaatattcgatatgtagaatatttattctgaccagtttgttttacctctatagatatatttggtttgtcaccagaattaccatagattactgatgatacacttcctccacctgcataatttttaatatatacaggatgcttatatggatttttaaactttaagtttaatcctccatcgctcacagtagcatctcttcctttaggcacataagtagatgcagatgaatgatttgtaacttgagttatctccatacccgaaagaagagccgcattataaactgttgaagatgtttgacaaacacctcctcctgctgattgttctagcttaccataaactataacaggtgcatctttgtaaccatttgctttattactaggtcctgtaagtttattgtatgaaaattcttcacctggcattaataatacatcactagtttttcttgctgataatcctacattatatgacctaccctctacagcttgtgaataagtagttgaatattgacctataacagaatttacagtttttacttgttcagttgttatatctggtttttgaagatttactttaagttctaaagttttatgctctttattttttatcatattatatatagactctttatttgctgccaaatcaaattctctacctacaacagagtctgtataacttagtccaccacttccaacactaatagaagcatttttcatcttaacatttatactatctgctattgaagacactttggaactaagttttgcctcatcatattcagcttttatcttcatatttgccttattcactcttatatcaatatatttttttaagttttgaaaataggaccctttttttgtactttcataagcatcttttacaacatcttctgtatcatattttaaatcaatatcttttggtgatattgtatattttttcccatcataagtaagatttaagtcttctggagtatacttatctgttatagcttttaatgcctctgctttagtcatatcagatacatttactccttctatatatacatttttagcgattttcccattgtacagaaatttactgttaaaaaaataagtaaatccacccattattagaactaaagctgccaatacaattaaaacacttcgttttttttctttacctaatcttgaaactcttgttgttcttctgcccataacttcacctcattttgacactagcttaaatttgcataatagagttcccatttcaaaactaccttagattatatttgaatagcttttgttaaacaaggaatttaatcaaatgtaactttattgtaaatttatgtcttataattagttttatttttgatattttttattatatttcttttactatttcttaacaaaaaattgtttattttataacaactaatttcatttatattgaaatttaaatgtaacctattacaggataatggtctgacaggtaaattttttctactgtgtatccttttaattcagtatttttattaacaaaaatgtaatctattctagagtttgatttttcaaatgttggtaagtaagacttgtttagtgaaatagccatatcattaaacatacttaaaaagacatttttctcattaaaatcaccacataaaataactatccccactaatctgttcctatagtctattatttcgtctaattgttttgctctctcctgcctatcaagtcccaagtgagtatttattacatttataattcttccatatgcatctatagttatacaaagagctccccgttgttcttttttgctagttaagaaaaaatgattactgtttaacattttagatgttgtaaatgtacaaataccatatatcatatttactttttttacatttgtagcaaagacaccatccatatttaaaacagcttttaaagctaaaaattgaggatataatacttcttgcaaacaaattacatcacaatccaattgttttaaatataaccccattttagttagagttaatctattatttgaatccatacctttatgaatattgtaggttactattttcataataatatcacctcttatgcaatataatacttactaaaatttaaacttatttacttttcacttaagaccattatttatcttataaaattgagtacttataaactttatcacaaaaaaacctaacttaagtatttatattctacataagttaggttttataaactattataatatttattatttcattcatttctaatgatgattctccttttttatctttttcaatttgccttcactaacaacaaataaaaatcccatcttcttgtatatttcatccaattcaattaaagttacttcaccattttttaaatttgttaatgttatatcttgtattcttcttgatggaattatcataagttatcaacactcctttaaattctttttaatctttatatttaaatatatttatgcattctgatatatattcataaattattaaaataaattcaaaaaacacccgttctgcaaacattcgttctgtatatttattatacatcatacagacgttcgattcaatataaaaattaaatatatctcgtttttagtaaattttacaatattatacactaaatatgtcaaaacatcttcttgaaatagattatcttgtcaaacaaaaaaaaccatttcagtaaaagcttctgcttaaattgaaatgacttttcttatttaaattattaattttataccatatttttattaagctaacatatgtaatatttgagttaccacaagagcacaataagtccctataatatttcctagaagccccataagtacacctactggtattaatacaggattgtgaaccccagcaatcattggagctgtagttactcctcctatattagctatacttcctacttcacaagtaaataaatcaagtttaaatagtttagcaagccctataaatgaaatagcatgtacaaggactactaccaatccaaacattatgtaaacaggtgcttctgacaatccaaagaaatttgctttactacctgtagctgcaaggagtaaatacataaacacatttcctaccagtgtactccctttaagctttgatatttttgtcatacccaataatattgatactgtagatgcaacaagtactacccacatagtttcattaagtatacctgaagttggaagtatcttggatacaatttgtgcaaaagacgcaactccaaacccaacagaaagtaaaatcataagttctacaaacgtaggtgccgtattatctttattttctttttcaagttttgatgtaacctcatctataaaacttgtatcgcactttgtccatttgttaaatttaggtccaaatttcacagacattagacaaacagacatccatactgtatatcctatagaacccataagtattgcataactaagtccttcttctgcaactcctagagcattagctgctgcaatcatatttgatgagccacctatccatgaaccagatgctgccccaagaattttccatgaatctgcacccattgaatttttaaaaattatgaatgctataacaaatccaagcataaatgtaaatgtagcacagaaaaatgataataacattttaggccccatctttaatatttttcttaaatcacattgaattaacaagaacactaacattaatggaaggaagttcactgttattatgttttgatacgttccaacatcttcattctgtgcaaataaaccaaatgatccaagtatagctgaacctaagtatattaaaagcattggattaataacatcaaataccttccatttcaatttatcaaccataaaaaaaattacacctacgaatacaaccaagaaactacaatatacaaatccagtctcaatcacattatacacaccctttcttttcctaattaatttgatttttatgatttctaagtaaagactttttcagataatagacaattaaaataaatacttttatctatatcatgctaattaaatacatatatacctaactattgacatatattaataaagatttgcacattaattactttagaaatgaataatctgaatttaaaatctttttcaacaattattttattactaaaatttttatttgtaaagataattaaactaaatattttattatttatttattttgttttgtatttatttttattaattattaaataaaactatttttactttaaatctatataatataaatcaaatttattttatatactttttttttaaatatgtttagattctattcttttaattttagttttcagaacatttgtatttatgttataatttgtataaatatatttatttaggaggaaacaatatgaatttaaatttaactaatactataaatttaatgaaaaaatatttggacattccaagcccagctggatatactgaaaatgcagttttagaaatcaaaaaagattttgaaaatttaggtcttgacactattcttacaaaaaaaggtgcacttatagctactcttcctggtgaagatgattcaaatcaaataacaatatctgcacatatggatacacttggagctatagtaaaagaaatatcatctgatggtactcttaaataccataaagttggtggtggatgttgggcagctatagagggagaaaactgcactgttataactagaaaaggtaaaaaaatcagaggaagtgttgtatttaagtatgcttctactcatatatatggtcaaacaaaagctgccactgaaagaaatgaagaaacaatgattattagacttgatgaaaaagtatttacaaagcaagatgtattagatttaggaataagtgttggggattttgtatgcctagaccatagatttgaggctacagaatctggttttataaaatctagatatatagataataaatcagctgtagcaatggttcttgaaatatgtagatattttaaagaaaacaatttaacgcctaagcatactactaacttttatataagtaattatgaagaaattggacatggtgtttctaaatgtttacctgaaaaaacaaaagaatttgtagcaatagatatagcacctactggaccaagtcaaacatctagtgaacatggtgtaactatagttgcaaaagataatttatcattatatgattttaatttaagaaacaagcttgtcgatgttgcagaagacaataatttagactacgctgtcgatgtatttactttctatggttcagatgcttcagaagctattcgttggggagaagatgttcaaatagcatgtgttggtcctggaacaaacaatagtcaccattatgaaagaacacatatagaagctattgaaaatacactaaaattacttataaattatatgcttaaagaataattaattatatattttaccaaagtcaattcttaacaaataattaactttaatttttatttttatacaaaaattggtttttctatagacttaatttcaatttactactattatataagtaacttcaattttctttagttaatttttattataatttatataaattgtataaaaattttcttcagttacttgttgttaaattaaatttttacaagctaaccctaccagaaaagagttatctaatctgtaaggaaatagtttaatatagcacattatacttgtgtaattaataacttttcttttgtagaaacttttctttacaaagaaaagttttttgattttggatttgtttaagacatattttctgagttaggaggatatttatgaaaaaggttgcagttataagtgctattttggaagagccaaaagaatgtcaatttaaattcaatgaggttgtatcaggttttaaaggtattattaaaggaagaatgggcattccttgcgaagaagaaggtgtctcaatcgtatgtatagcagttgttggcgaaatggatactattaatagtttgactggtaaattgggcaacatacctcatgtatctgtaaaaactagtatatcaaaaaaagaagtttaaggtggtgagtacaaatgagtctaaattctactccacaatcggtaagagtacatataggtctctttggtaaaagaaatgcaggtaaatctagcataataaatgctataacaaatcaaagtgctgcaatagtctcagatattgctggaactactacagacccagtatttagaccaatggaaatccttcctataggaccttgtgttcttatagatactgctggtcttgatgatgttggtgaacttggtgaacttagaataggtaaatcactagatgttttagaaaagacagatatagctttactagtagtggattgccaaattggtatatcacaagaagatttgtcactaattgaaaagtttaatgataagaatatccctcatattctaattctcaacaaaattgatactattaagaatcaatcagaaattttaaacttaactaaaaataaagttaaatgtccagttgtttctgtctcatcaacagataaaattggaattgaaaatttaaaaaatgaaataataaaagttttgcctaaggatagcactgagttcaaattggtatcagatttaattgaaccaaatgatttagttgttttagttgttccaatagataaagcagctccaaaaggtagacttatacttcctcaacagcaagttataagagatattttggataatggtgcaatttctatagttacaaaagaagatagtttaaaagaaactctatctaatttaggcaaaaaaccaaaacttgttattactgactctcaagtatttccacaagtaaataaagatacaccaaaagatattcctcttacatctttttctatattgtttgctagacaaaagggagaccttaaagaattgattaatggagcttatgctttagaaaatttaaaagatggtgataaaatcttgatggctgaaggatgtacccatcatagacaaactgatgatattggaacagtaaaaattcctaatatgattagaaagaaaactggcaaaaatattacttttgaatttagttctggagtatccttcactgaagatataaataaatatgcccttgtagttcactgtggagcttgtatgatgaatagagctggaatgttatctagaatagaaaaggcaaaatctttcaatgtacctattgtaaactatggtatcttaatagcatatgtaaaaggtattttggaaagatcacttgaacttttcaattattaaaaatttaactatacttaataattacatatttgaatatgactaaaaataagattaaatactttatagataaactttacagcattaattcattaagttttgatgaactactatatttaatagaaaatatcgacaatgaggaatataacttcgaacaaaatttaagaaactatctttataaacaagctagcgacatgagaaataaacattatggaaatagagtctacttgagaggacttatagagcttacaaactattgtaaaaataattgctactattgtggaatacaatcttctaataaaaatatcataagatacagactttcacctgatgaaatacttgaatgttgtgatataggttataaaataggatacagaacattcgttttgcaaggtggtgaagatgcatattttactgatgataaaatatgtgaaattgtttcaagtataaaaaataaatatgaggattgtgccataactctgtcactaggagaaaagagttatgattcgtataaaaaatactttttatgtggtgcagatagatatcttttaagacatgaaactgctacagacagtcattataaaaaattacatccgccaaacattgagcttagaactagaaaagaatgcctaaaaaaccttaaagaaattggttatcaggtaggtgctggatttatggttgaatcaccatttcagaacaacaaagaccttgttcgtgatttattatacctaaaagagttaaatcctcatatggttggaataggaccttttattccacaccatgatacaatttttaaggattataaacatggagatttagagaagacattacttatgctttcaattacaagacttctacttccaaaagttttattacccgctacaacagccttggcatctataaaccctagtggtagaaatgcaggtcttttagctggttgcaatgtaattatgccaaacctttctcctcaagaatttagaaaacaatattctctttacgataacaaagcctttactggtcaagaagcttgtgaatatcaccaaagtttagaagaaaacatcaagtcattaggacttgaagttgactattctcgcggtgataatattgaatggaggcgtttgtaaatgttcataaaccatgaacttattaattctttattagaagatgcaaaaaattcaacttctgatgatattgaaaaggtacttgataaggctgatagaagggaaaaacttagttataaagatatagctacacttcttgaagtagaagataaaaaacaactagatagattatttagtatagctgggcaaataaaaaatgaaatatatggtaatagagtggttttatttgcccctctttatgtatcaaactactgtgtaaatgaatgtgtttattgcggttttagtaaatgcaacaaatttaaaagaaaaaaacttaccatggaagagataaaggaagaggttaaaatattagaaaaaatgggtcataaaagacttgctctagaagctggtgaagaccctaaaaattgtgatataaattacatcttagattgcttagatgcaatttattcaacatataatgaaaacggaaatataagaagggtaaacgttaacatagcagctacaagtgtagatgagtataaattactaaaagaaaaaggaataggaacttatatattattccaagaaacttatcacaaaccaacatttataaaaatgcatggtcaatctataaaaaatgactattattaccatttaacagcttttgatagagctatggaagctggtgttgatgatgttggtgcaggagttttatttggtttatctgaccctaaatttgaagttctaggacttatgatgcacaacgaacacttagaggaaaaatttggtgtaggtttccatactatatctttccctagattgaaaaaagctgaaggtatgagcttagaagattttcctcacttagtttctgacgatatgttcaaaaaaatagtagctataactagattggctgttccttttactggaatcataatgtccactagagaaactgctgaaatgagaaatgagttactaaaatatggtgtatcacaaattagtgcaggttctctaacaggtgttggaggatataaagcatatgaagatggtgacaatacagaacaattcgaagttggagaccatagaagccctgttgaggtgcttaaagaactgattactgatggatatatacctagttattgtacagcttgttatcgtaaaggtagaactggcgatagattcatgagcttagctaaaagtcgacaaatccataatgtatgtacgccaaatgctcttactacattaaatgaatttttaatcgattatggagatgaagaacttaaaattatgggtaaaaaacttatcgcagaagaaataggtaagatagaaagagaagatataagaaacatagtatctaacaatatgactgccttagagcgtggagaaagagatttatacctataaaattttattacttatatattatttattgtatattccataggttagtagtaatattatctaaagggaaagtttaagggagggagattaacattgaaagataacaacaataccaataaaactattcaatttggagaaaaaaaggctagcctggaaaacaatattcaaaaaaataaaaatatcaaacttgataatacacacaaagtcattccttaccctaaaaatagaaaaaaggatgataaaaagaaaggtaacaagaaaaagaatacaaatacatctaaagtaaataaaaataattatggccattcttttttcaataacaaatacaaatataaaagaaaaccatatgttattgctttatacacagtaattcttattcttttagctatcttaattataactaaattaacagatagtacgaataaaggtaattattctcgtaatactgtctctgatactcacaaaaacgacatccgaaatatagtctttaatgaatcaaacaattttcttatttgtgggtaacttaaaagagttatctcatttcagaaattactttctaaaattgagataactctttttttcatttaatatttattttaccaaccttgagttacttcatatacttcatcaccaattctaccatttaaataatcatctattgcagaatctatgatgctcattgctttatctacttgctccttagttattactagaggtggttgtactcttaaagtagattgtcctaagaatatcattattaatccagtttgtatacatctataacatatcttagctgtagcatctggatgtttttcattagaaccttttcctttaactatatcaactcctatagataaccctattcctcttatttctccaattatatcgtatttttcttttagtttttcaaatcctgctttaatataatctcccatttctatactcttttgaagtaagttttctttttcaattatctctatagattttaaagcagcgacacacactgttgtatttccagctaaagtaaataaatgtgctggtgcatcaagactttgcattatttctgttcttccaacaactgctcctaaaggtaatccacctccaacagattttccaagaactataaggtctgcttcaacaccaaaattttctataccaaaccacttacctgttcttcccataccttgttgtatttcatcacttacaagtaatattccattttctttacatattttacttaaaccttgtacccactctactggaggcactattattcctgcatctcctgcaattggctctataaatattgcagctacctcttctgctggtagatagtgtgcaaaagcatattctatctcatctaaacattctttagctgttctatttttatcaggataatggaagtgataaacttctggtaacaatggacccatttttcttctcatatttgtacttaaagcagatatagatatagctccataagtacttccatgataagattcacacatagatattatctttgttcttccagtataccctcttgctaattttatagcagcatctatacaagcagaaccagttgcactgtatagtacttttttatcattatctccaggggctatttccacaagcttctcagctaattttacaggaggatcactatggaaatatgcaagtgtatattgtgttatatcatccatttgttctttaactgcttgtgagatttccttattaccatgacctacatttgcagagcctgcacttgctaaaaaatctacatattcattaccttcataatcatatagcattgcaccatcacctgatttaaatgctactggataataaggtatcttttgagttttagcaacatattttttttcttctgtacttatcatttgactagttatctcgctcattggcaaatcatcccctctttaaataaatttatgttctaaaattattgcgatttataaagatattctcatataaaattctttatatacttaatgttagtatttttgacacaaattgtcaatatatgtttttataattttcaaaatatttgttatttagaaacaatatattttatttttatcaaataaacattatttttcaaaaaataaaggactctattctatttttatagagtcctctgaaaataatcttataaataccattattctattcgtcttcattaaattgtataattaccttttctcattaataatttttttaaaatgttctagttgctcttgttgttttttatgttttatatgtggaaatgcttttataactcttttttgtaaaataatattagactctatacggtccaacttactatttattttgtttattttttctctaacttctaatccgtcgttatttattgttttaaataaagcttgtatttctcctctatcaaatttatccaatttcacatttatatcattaaggtctgtaattatatcgtctagtaagtttaactttatatctaattttttaagtgttataatagtaacaatcaaatcaagtatagtccaaagtgttgtaattatagccattgaaattaatattctatatggaattatacttacaaaatattttataaatggatgtataaatcttattattaaaacagacattacaccaaagtatattgcattttttaaacatactctaccctttatattgaattttctgtcagaataatcccaccatttagcatgaaataaggtttctaaaataaatcctgtaaaatattctagtatcgtagttaaaatcattcctaatagaaatactattactacattattaaatcttcctaatagtgatatcacaattactgctccaaaaccataaacagggcatattggaccatttaaaaaacctctgttgattattcttttgcttgctatagaacatcctatactttctactgtccatcctaaaaatgaatatataaaaaagtacaagatatattttattatctccataatttatctctactccttcactaatgttcttattttatgcacaacgtaaaaataattatagaaatagttttttcgttttttatatttgttattcttttattcttgtttaatattttattcatacaatccaattaataatttactagccataataccatgtttatcctttggctgattttctttatcaatccaaacattaatagtatcatatctccttaataaatctaaattcttcacatcaaattcctcatatttaactatatccatttttgattctttggtaattatataagatactaattttgtattttcatttaaataaattcttatatttccatcagaatcaattaaattctctggtctctttactttgttattagaacctgctttaatagttattattccttttttaaagctctcaaatgtcccaactatatctactgtatctttatttatatctttaattatttccctattttcttcaattaatatttttgatatttttctatcaggtctaaatttaaaagttagtaagttatgataatttttagaaataactcctaatcctaaaactcctaaaactaaactagtagctattatagccttaaatcttttaatatcattaggaaataatttattcatgtttatgtaaatattaattccaattattccacctaatgaatttaaaataacatcatctatatcactacttccaagagcaaaaatatattgtgttaattcaaatgctaggctaacaagtataattactataattatagtttttttatttagatttttacatactataggtaaaaaaattcccataggaataaatatacctatattttctataatatttacagtagctttcataaagtcaagattactatctactataaattgatatattgtataaaatggaattaaatttacattcctaaacgttcccttgaaaatagcgtaaattggtacatctctaaataaaattattcttataatcattaaaatatataccaaaaatattatgtatataattgacagtaacaatttttctgactttttactttctatcactgataagtctcctttcgctattaatattttaagtatatcaataaatatttaagacgattttaaaatttccttaaaatttccttaattttcaaacaaaaaatcaaaaaagcctacacttaaatgtgtagactttaataaattttcatacaaatacattttattgaataacgaacaatcttaatgtagaaaaaactataactacagttaaaagaagtctagcatataaaaaatttttttctttcaacataactcctgcaactccaaatataaaaaatagagaagcaataaattttccaataagattattattaggataataactaaaaagcataaaacaaagtacaaatgtaagtactcctattgcattaaacacaattttattagatgctatttttcctttattgaaaaagaaacagaatattgacactaaatctaaaaataaaaatacataaaacattccttttaaaacgcccatttttataccccctaaaaattctaattataatatccagtttatttcatataatcgtcaatataatcaatactttataacatcagtataacagtattacaaatttatattacgaatgtattacttcgtattcatacatattataatcacactcatacatatttaaagactcatatgttgcttttgcatttatgttttctttttctacatataatctcattccaactatattttcatctttatcacatatattttttatataattaaataaataattaaagataccttttcttctatattccttatctacatatacactctgaatccaaaggaaatttccatttctccaatcactccactcatatgtatacataatctgtgcaacaactttatcaaatactgtatatacatgatattttccttttctctcatctaataacaatgcttttacacctttagttaaaacatccatatcaagttcttttccttcagtttctttagccaaattataattaaattttgctattgtatccaaatcatccatacgtgcttctcttatctctattagttcttcattttcatataactctatgtagtccttttgttgctccatacttattcctccatatctattttatctactaaggttttttatataatatatttatagagttttttctatcttcataaatgcataatcaagtgtagcctctaaatttccattattcttacctcctccttgagctaatactttacttccaccacccttgccatctataagacttattgcatcctttaataaaactcccatattaatatcttttaaatttttagaacatgcaaaaactaaatttattttatcattaaatttaacagctaataatgcaatactattttcatattctgcaattttatttgctatcttatttacatatttcaaatcttcatcatcataaatttttttaatgaccgaaatattgccaaccttatttgctttttcaatcatttctttgacctgatatgtagatactacttcttcaagccttctttttttaattaaagcctcttccactttactatttagatttacaataccatttatagcatcttcctcactacagcttaaatatctacatattttagtcaaatatatatccctcttcaatacttcatccactgcccttttacctgctagaaactctattcttgtacttgacttatgtttttcccatttctttatttttatcattctcaattcaccagttgattttggatgcactccacaacatgcattcgtatctaaatcacctatttttattactcttatctcttcatcagtatttggcaaatcacgtcttaaccaaatcttttttagttcttttttcgttggaagtaatgtctctacttgtatattttggcgaataatttcattggcaaacaactctatctctctaattttgttctcttctaaattaccttctatatctactgtactatactcatttcctaaatgaaaacctgtcgtatttgcattaaaagttttaaaaaaacatccagataatacatgttgtccaaaatgttgatgcattccatcttctcttctatcccaatcaatactacactttaccttatgtatctttataggttttttatctaatacatggtatatattttttccatcttcatacacatttattacatcatcattctctatttttcccaggtctccaaactgacctcctccaccaggaaaaaaagctgtcttatctaataaaacatgatacttattttctacttcttttatttcaattatttctgctgtaaaatctcttatatactgatttgtataatataacttttccattataattctatctccattttcttaattatagactactttactttttaaatacaaatttcaagctaagcttaatttaattgtattaaaatagaactcatcctattatttactaacatcttctactatattttaacatatagatattagtgttaacaaatttataattttatattatttcaatattttataacaagtatgcttacttattttcttatataataaaatgtatattaaaacatattaaattgcaaaataagcttcaatctcttttactaatttcatccattattaatgattttgaaatatacattgcttctataatattcttaaaacgtgtatgatgagatgtctcctcagaaaatttcttctgtactttttcacaattaataatccttgaagatgctactctcagtacttccatcaactcttcttttgtatgataattcataacacatttactcctttgttttttaatttagagaaacagtatacctcaatttaatatcattatcaactgatatcattattatttatatatatcttttaacacttaaatattctaactatcagtgacattacatattttaataattattaatatacatataatactttaacattcattaatagagagtatattaacattgcttttttaaaaattttagtataaaatcatattaaataaattttctgaaataataaaatattaaaatatccaaaaacagcttttgataacatctataattttcaatgtatcgttattttagggggagtgatttaaaatggcaataaagccaagaaaaatatctattgtaggttcagggcatgttggttctcattgtggatttagtttaataactcaaggagtttgtgatgaactctttatgattgatatagatgaatctaaatcaaaagctcaagctttagatttagctgatgcagtttcatatctaccacataaagtacatatagaaaaaggaactttttctgactgtaaagattctgacatagtagtgataagtgttgcagactcttcagaagggcctttacgtagacaaaacacaactagattagatttactaagaccaactattggaatgataaaatctatagtaaaacccatagttgattctggctttgatggtatatttgtagtcatatctaatcctgttgatgtagttacaaattatatttgggaaaaatctggctttcctaaaaataaagtcattggaactggaacagctttagattcaacaaaacttagaaggattttatctgaagaaactggaatcgctcaacaatcaattcaagcttattctatgggtgaacatggagattctcaaatggttccttggtctcatgtttcaattggtggtaaaccaatcttggacatgataaaagacaacccaaatacttatagcaatttagacttaccatcaatagttgaaaaaaataaaaaaacagggataagtataataaatggtaaagattgtacagaatttggtataggtactgctttagtagaaattgtaaaagctatactacacaatgagaaaaaagttcttccagtttctacattactagaaggtcaatataacgaaagaaatgtatttgcaggtgttccatgtgttataggaaaagatggtattgaagaaattattgaaatcaatatgactgaatatgagcaaaacgaatttaataaatcttgctctgttttaagagaatgtattgcactttcaaaaacactttagattcaatattctttcttacactaaaagcaggtaaatgacttattgaaaagacttttaactaagttaatgtttaaatcatttatacctgcttttaattttaatactaaaatataaacctattttttaccatcaaattttataactttactttttttatttacctcttgagataacaatccttttttcaatcccatcaataattctaagtcttctggataaagatttattccaaattcctctaaacttgatactatactatttacactcattattttattttctatcaataattcaactgctctttttaaatacgttgggcttgaacctttcattttgtctagtggttcttctatcaaccagccttttttatccatttcattcataagataattgtattttttgtaatttatcttttctagattatatgctctaaaaatcatagcagatataggtacaatccattttttctttagttctacataataatctaaatcttctggatgagtcaaatcttttaaaaaactctcttttggcaataaaaatgcacaggcatactcatcttctgaaaattgcttacttggtattcttaattcacttgatattatatatccaagctcacatgccaaagtataatttctaattgatgctgactttttgtcattacccagagatattagatatttagattctttactaattctctgtttttgagtaaagatagttgccccttttctatctacattcatacctgatattataatccctttagattctaacaaacttaccatatttactattggagtactatttaaatcccaaaactctctagtcttatatgcaagagattctatatcacttatattaatatctgacattacttttctatttggcaagttttcttttggaaacttaatataattctccataaatgaatatattttatgtattataattattttttctctataagaaatctcttctactctaggtagtttagattgagggttaaaatggctatcctctacaacgatatttatattttcatttttataaaaatactcttttggaaaatttaatatattagataattttaatgtattttctatatttggtacatacttattttcctcaaaagcttttaaatcttttttatttattttagtttctttagacaactgttctatcgtctttgctctaaaaattctagctgattttaatctctttccattaaagtcttttaaattcatttgttttctctctttcaaaattaaattcttaatctattggtataaataagattacaattaataatttatcatattattgacaaaaaaacaaaaggtgaaaatatttttttatattttcaccttttagataagtttataataaatattcctaattactcaaaaagttttaaatattctccatatcctaaaacttccatattttctcttggtataaatttaagagaagcagaatttatacaatatcttaaacctccaagttcttttggaccatcatcaaatacatgacctaaatgagaatttcctttagcacttcttacttcaattctgtacataccttgtgagaaatcacttctctcaatgatagatttatctataactggctttgaaaaacttggccacccacatccagaatcaaatttatcttttgaagaaaataacacttctccacttacaatatcaacataaattccctctttgttattatcataatattcattttcaaaaggtacttctgtcatatcattttgagtgacttcaaattgtataggagttaaagtcttttttaactcttccctatttatattgtttccatcccaatgactttttacaaaattatatcttccagaccctttataatacatattgtagtttaatggtctttttttataataatcctgatgattttcttctgcttcgtagaatttagttgctggaattatatcagtcactattttactatcaaatattttactattttccagatgttctcttgactctaaagctatatttttttgttcttcatcatgataaaatatagcagtcttatattgagttcccctatcaccaaattgtccaccatcatctgtaggattaatctgtttccagaagatatttagaagttcatcataacttattatatcatcatcatatgttatttgaattgcttctaaatgaccagtagttcctgaacatacctcttgatatgtagggttttcaacatgaccacctgtatatccagaaactactttaataactccatcatacttatcgaaaggttttaccatacaccaaaaacatccacctgcaaaagtagcaagttttatcattttcatcactccttaaataaattatactttatttattccctaagaagtaacttaataatctgcattttattatttttacctactcaatgaaatcatgtgcaaaaatacaattgcaaattgaatctaatttctataaaagctctttttctttatccatccaaaagcatcttttatatcacaattttctcctaaagacattagatattctaatgcatcacaatcatccatagctacatctttttccatcttaggatttaatctatagtaattatctccaagaagtttttgagaaaataactgactcatttgagaatttccttctaaggtaatagatataattggtaaatcgggttctttattaattatccagtcaatagctccccattcagtagtatctgcctttatactattatatacatatccagtccctattgaaaaaagtcttgtattcttaagtttaaatccactgtcaatggcatgaattatacacgctaaacttgggtcagttgctattattcctccatcaacatgacgattatatgttggaaaaaatactggagcagcactacttgccattgctacatctacaactttgctagtctttgtaaaagaatttggcatattgttataaaacactggtttccatgcattttcctcatttcctatataaaaacttggtatcattactaatttatttaaatcttttaattctagttcctctggaaatatacttaataaaacttcttttaagtttttgttttcatactttggtctgagtatttctgcataacttttattaaaaatatacttagaattttcaattgagtaaagttcttttatctctttagggcttacaccatacgcaagtcctagtgcaattagactccctgtagatgtccctccaaacatatttatattgtttaatagatttggatactcttttactatcctctcaagtatggatatactcaatgccccttttaatccaccaccatcaaatgccaatatattaaaattagaacttttcatatacatatacccccacataaaacaccttatattttaatcaaaataatttcactatagtatatatattttatgcaagttacatattacaatgttcctcttttaatatttaagttacattcaaacctttagtacttaaaataaaatatataagatattatatatctaagtattataaatttaatacaaaaattcttaaaagaatatactgaaagcaggtttatttttcaattattacaaaaaataaataaagggtcgtctcaaaattgattttttaatcaaattttaagtttaaccccttatcttaattgtgacatacttaaaaatattttaactataaatatctttaagtatagatatatttatttatcctaaaatcttcttcatatcttcttcaggagtagatataggtgtcaatgcaaatttatcaaccaatatatctaatacattcttagataagaatgctggcaaagaaggccctatatagatatttttgatacctaaatgaagtagtgtaagaagtatacaaacagctttctgctcataccatgacagtaccatgctaagaggcaaatcatttactccacattcaaaagcatttgccaatgaaactgccactttaattgcactataagcatcattacattgtcccatatccattaaacgaggtaagccacctatatccccaaggtctaaatcattaaatctatattttccacatgcaagtgtcaatataacagtatctttaggagcttgttttacaaattcagtgtaataatttcttccaagttttgcaccatcacaacctccaaccaataaaaagtgtcttatagctccactctttacagcatctactactttatcttgtacagatgaaactgtacctcttgcaaaaccagtagttaatgtatctcctccattaataccagtcatatgaacatcttctctatatcctccaagttcaagagctttttctattacactagaaaaatctttatcttcatcaatatgaaccatacctggataagcaactacttctgtagtaaatactctatctctataactatctttaacaggcattaaacagtttgttgtaaataatattggagcaggaatattatcaaattctttttgttggttttgccatgctgtaccaaaattaccttttagatgtttatattcttttagttttggatatgcatgtgctggtaataactcaccatgagtatatatatttatacccttatctttcgtttgttctaataatttgtgtaaatcataaaggtcatgtcctgtaactacaataaatggccctttctcgattttcatagatacctgagtcggttctggtgttccataagtttcagtatttgctctatcaagcaattccatacattttaagtttatttctccagttttcataactagacctaaaagttcgtcaatagacaagtctcctccaactgctattaatccttcatagaaaaattcatttacgtctttgtctgtataaccaagtaccattgcatgatatgcataggcagccatgcctcttaatccaaataagattaatgattttaatgaacgtatatcctcattatcattccataaatccttcatatcatagttatcatttctattacaagttgttgaacaatctgaacatctaggtacaagtttacttttttctacctcagttttttcaatttgtctttttatagcttcatcatcaaaacttacattcgttatagtagtgaatagcccctctatcataattttatctgtttcacttgttggtctattcttatttccaatagttgctcttgaaagaccaatcaacactcctgtaagctcgtcttgcaagttagctgtacccccctttttaccacaaacaccatttatagtacaacctttacctcctgctgtttgttcacattgaaaacaaaacattttttccattttttattcctccctttttatttattaaaatttattatatttttctatgattcacttaattaaatttctccatctacaatttttccatctacagatatagtaactatttgccatggtatcatttttccactattttgtagagctgtcttaacagcatttactataccaccacagcaaggaacttccatacgtgttactactatatttttaatatcattttcttttaaaatctctgtcagtttttcagcatagtcaacttcatcaagtttagggcatccgattaatgtaaccttatttttcataaatttattatgaaaatttccatatgcatacgctgtacagtctgctgctattaaaagacttgcattctttaaatatgatgcattagttggtactaattttatttgtactggccattgattaagttgagaaccttttatctctactatatcattgcttatagatgtactatttgaaacctctctatttattgacttagactgagaacctggacatccacatgctaaagttttcttttgtgctttctttgcttccatatttgcttttactgcagcttcatcatattctgctgcttctctatactcaaatgaaatcgcatttgttggacaagttggcagacaatctcccagcccatcacaatagtcatctcttaaaagttttgcttttccatttaccattcctatagcttcttcatgacaagcttcaacacatagtccacaaccattacactttccctcatcaattttaattatttttctcatcatttatatcacctcataaaatttttttaatttaaagtattgatttcttatatatttatttttaatacctatatttctttatttcaaatttcttgtagtaggatttttatatccccttgcttttataaacttagtatagtacaatgaaaacaaattatcggttgcatatgcaacaaggaagtgattatttgaaaaaatttttagaaaagcatatagacctacttaaaaaaattcctctatttgaaggaattaaaagtgatgagcttgaagaaatgttggaatgtttaggtgttgtagataagacttacccaaaagatagtataatattctctgttggaagtgaagttacttctattggaattatgcttaaaggaagtgctcatataataaaggaagatatcgaagggaataggaatattgtagctgaactcttgcctggagatttatttggagaggtattcgcatgtactagactacataaaagtaatgttacagtaaccacaacatcttcttgcgaagttttatttataaagtttaaaagtgtaactggtatttgttcatctgcatgtgtatttcataataggcttgttgaaaatatgctacaattaatagctgaaaaaaacattttacttcacaataaaatagaattactttctcgtaaaacaactcgcgagaaattgcttatgtatttttcaaaacagatagaacaaacaggtagccaccagtttacaattcccttttcaagaaatgaaatggctgattttttatgtgttgacagaagttctatgtcaagagagcttggcaagatgcgagatgaaggcttgttatcttttaataaaaataaatttgaaatcttttactttcaaaaataaactagatatttaaacatatttatttcaatatatactatattagttaattcaaattataaatatcatatttgaatcttaaatttatatttttacttaaaaagttaatagatatctaatttattaaaattaagatacctattaactttattaattaagtgtacaattagcttattttctttgtagtaattgctgttttatctataagccaatcttttccttctactaatcttgaaactaacattgatgatactgtatttccagttgtatttaatatagtattaggaatatcagttatagtagttataactgttaacaatggaattgcctccactggaaaaccgaagatgctaaccacgagcatctcaccaataagtcagccacctgctacaggagccataaatactccaacaacaaatacagttataaataattgacctatcgttgctggatttgccattccactgcctaaaatacctgataaaaatgccacttttattattactgctaaaactgacccatctttatgtatatttattccaagaggtataactgtttctgatatatcatcaggaactcctatatttttactagcttctaaatttgatggtatacatgctgaacttgaagaagtagctagtgccgttgctattggttttatagcatttctccagaattgtctaaacccttgttttcctgcagataaaaaagcatacagactgtaaaataataagaaatacatggctgctgttagtgaataaattacaaacacccttacatatccttgaattattttgcttccaagttccccaattattgtagctgtataacagcctagccctataggagcataaagcatgactatacttactacttttaatattgcttccgttccttctgataaaaactttcttattgtatttcccctatctcccatcatagctattgctgttccaactaaaactgcaaatataactaattgtagtaaattgctactggaaaataaatctccaaaatttttaactgtaatacttgatactacttggtctaataacgttccttttgattctaaagtttctgcatcttgagccaccattaaactttttacacttgatacatctaatcctttagacggattaaataataatgcagatgtaatacctaaaaatgcaattacaagtgttgttcccataaatactatagctgtactcttcattatttttccaaaacgttccatattttttatactagcaacacctgaagaaacactaagaaaaactaatggtactactatcattaatagagcatttatgaataaatctccaaatggttttagtattgaagcttttggaccaagtactaatcctactatcacccctattatagtacatgctaaaagtataattgatgacttataattttttaaaaagtccctcatttatattttcctttctaatgttttatattataaattaccctaaatcctaaaaaaattaaagtaaattatctaatgcgcattaataatttttgtaattttccccaacagctactttagcaaatactggaatatatgtcaatttctatagtttttttgtatctttaatattttattaatagttcatatctatatataaatattaataaaattctgcttttaaaactttttttctagattaattttaataaaacaaacaatataaaaaaatatatataatattgcttaattattttcaaatttaataatttgtactttaatataaagttttagtatactcattgtaattcctatgctttatcattccatcaagttaattttgtaaacatatatgatattttgtcaaatattattttttcatgtacttgatatttttgatatacttttaaaaagaattttcaaatagttacatttctaattttaaattaaataataaatctaataataaaaagatacttccattaaatttattatctaacttataaatttaatgggagtatcttacatatcttctaatacttaatttatacacttttaactaaatacttcttctttcctaacgatatttaaaaattttgcagttctttcatttttaggattattaaatatttcatcaggagttccttcttcagctattacaccattatccataaatataattttatcagcaacttcttttgcaaaatttatttcgtgagttacaataagcattgttattccttctttcgcaagcgattttataacgcttaaaacttctccaacaagttctgggtcaagtgcagatgttggctcatcaaataatattacatttggatttactgccatcgctcttgctatacctatcctttgttgctgccccccagacaattttgatggataaaaatctttcctatccaacatacctactttatctattaattttaaagatatttctctagcttctttattactctttttatgtactactatcaatgcctccattacattttctaatgctgttttatttttaaataagttataattttgaaataccatagatgtatgttttcttaaattggctatatctttttttgttgctttttctacatctacttttacatcaccaatcattatctttccttttgtaggctcaactaaataatttaaacatctaagtaacgtagatttacctgttccagatggtccaagtatagctactacttcactttgatttatctctaaatttatacctttaagaacttctgtccctttaaaacttttatgtaaattttctacttttatcattgttatccacctttttaaataaatataataaataatatgttctacatcaaaattaatatactagcattaaatttaaaaataggctaaatatatttttatgaatgtactctatagttgacataaataatctactgcaagttgtgagaataatgaagatgctatactaagacatttttcatctatattaaacttgttactatgcaatctgtagtttatatttttttctttatttcctacacctatatacataaataaaccaggtttttctttcatataaatagcaaaatcctcacctgtcattgcaggaaaatcaattatttcaacattttcaactccaagtattttgcaagcactttctcttcctagctctatcatgtttttgtcatttataacagcatctcctcctgtactcttttcaaatttgcaatctgctccgtatgctctacatacatttcttactatattttctagaattttacttacttcaattacttgttccttgcttatcgctctaatagtcccttgaagtgtgcatacatctggtattatatttttagaaacaccagaattaaaagaacaaacagacactactacaggtacaactgggtcaatttttcttgaaactatctgttgaatggatgaatatactgcatttccaactgcaattgggtctatacaattatgaggctctgctccatgcccgcccttgccaattattgttatttcaaaagtattagtcgctgccatagcacaatttctagcgattccaatttttcctgattcaatagttggccaacaatgaccagttgctaatgcatccacaccttcaagtacattttctttaattacaatatcagaaccacctttttcttcgccaggttgaaatagtaattttacatttccattcaattcttcttttatgtcatttaaaatcattgctgttcctaacaaccatgaaacatgggcatcatgcccacaagcatgcatattatcatttattgatttaaattctaaatcattttcctctttgattggaagggcatccatatccgctctaagcaatatagttttcccaccattattttttccttttatagtagctaatactcctgtaccagcaacatctatgtattctattttaagtttatttaactcttcttttataagtttggatgttttaaattctttaaatgctaactctggattactgtgtatctgtcgtcttatttttatgattttttctctattttttagtgcaatggattttattttagtttcaatcatttgcaagacctccataactcattttaatttataaagactaatctaaatacattgtaatacacagataactatagataaatttagtatacttatctatagttatcacagttttatattttaattttaaagtatttatttttgtatatcagcacttacatccattccaaaccatttttcagatatttttttcactgttccatctgaaagcatttcttctattgctttatttacatcttcttttatagttttagatttttcatcatttttcttaaagaagtatgctatattagtaactgataatttttcatctaatactcttaccttcatattagcttttttagcgtctcctacaacagtaagttctgcatcaatccatgcgctaactcttcctaaatctaaatcttgaagaccattagttccatcaccataaaccttttcttcaaacaaattatctttattaacactagctgcaacctgttgcccttgagaaccttctgaaactgctacaacttttccttttaaatcttcaagtttattaatttcgttgtttccatcttttacagctatacatacagaatcagaaccataaggtatagaagcatcgtatttttctaatctttctttagacattccaaagaaattggctgccacatcaactttaccagaatctaacatcccaaatatagaactaaaacctgttggttccatttttatcttatatccacttcttttaccaatctctttccacatatcaacttcaaaacccttatgctcaccattatcaacataagaatatgggtcagctgaattagatgaagctacagttataactttttcatcctttacttcctctttttttgaacaaccagcaactacaaatgttaacgataaaactgccactaaacattttataatatttctttttaccatatctcttctcctcacaccattttttatataaaaatacttttatgtattttcttaataacttaataattgcttattttcttttctaattttttttgcccccaccctaaaggagttattatgcaccagtaaattaccataactgctccatacacttcaaagaacttaaaactcaacgctccttgtgatttggcagcacccattatatcatttactccaacaacaaaagctacagaagaccctttaattaaatctataaaattattgaataatgatggcagtgcaactcttacggcctgtggtatcactatccttttcattgtttgtaaatttgttaatcccattacatatgctgcttctatctgacctttatcaattgaaagtatagatgcccttatcgtttcggacatataagctcccatatttaaactaagtactatagatgttgcaaatactgggtccatatttttaacaaaatcgttcatatacgctagtccaaaatataaaaagaataactgtggcataagaggcgtacctctaaagatagatacatatactttacatatttgattcaatactttcactttgtaataagatgataatgctactattgtacctataattaatgaaaatactaatgaacttattgccaaaattacagttacattgaacgatttcattattattggaaataattctaaaaaatatttcatattaaaaatcataaaataagtccccctagcttaatgttgttttttataaaactttgtcgaatattaaattacaatagaattttatttattttttcaatagaaaaactattttttaacttgattatacagtccattttgatactatattttctcaataatttagattactaagtttatttttctaaaattaaaaatttatttacaagtaataatatatctacatcatcccatttttaaatattgaaatctaatatgcctttcctattcttttttcaactttgctttgtatattactcaatattatagatactgcccagtaaattaatatcgttatcatatatatctcaaaatatttaaaacttgaagcagcctctacttgagctactcccattaaatcttgtattcctatagttagacctaaagaagaacctttaattatgtccagtgtacagcttacaataggaggtactgcagatgtagctgcttgaggtagaattattttaaccattgactgatatttacttaacccaaaagcataacatgcttcctgttgtcctttatcaacactctcaatagatgctcgtataatttcagtcatatatgcagatgaatttacacctaaacaaattactattgctaaataaggtgaacaatctttcataaaagaaaatatcattggaaatccaaagtaaaagaaaaatatttgaattaaaagtggtgttcctctaaagaatgaaacatacactcttgttatgtattgcaaaacttttgattttgtctgtgtgaaaaaggcaagtattacacctaataatattgataaaaaaaatgcaacaatagatattagtattgttattcccaatgctttaatcaaaaatggaaatatacttagacaaaattcaaaattaaaattactcattaataggctccttagtaatgtcttttcctagccaggcttcagatattttagtcaaagtcccatctttatgcatctcttcaattacttcgttaatttcttttgtccatttttcacctttttcatttttttgaatcgcaaaagaacaggctccgaattgaattggaggttctaccattttaagatttaatttttgttcttttatagctattaaagcctcaacatcctgcgcaactactgcatctaatcttcccatttctagatcttgataattccctttaagagttgcacttgaataatttactatttttatttcatcatttgggtacttttcttttagtatttcatttgctactgctccagtacccacacctactttcttgccaactaaatcatctattgattttatactagtatcatcttctctaacaataatgtttgttccactataattataagcatctgaaaaagcatattttttctctctttcaggtgttgcagtaagttgagcagatacaacatctgctttatcagcttctaataatccaaataatccactaaaatcagttaatacccattcaactttacaattagttcgtttagcaaattcatcccaaaaatctacttcaaatcctttaagtttatctttatctttaaaagcaaaagggtaatatgttcctgatgttgcaactcttatagttttttgttcttctttatttttattatttcctgatgaacatcctgtaattaaaagtgctaataccaaggcaagcataataattaatttaagttttttcataatttattctctcctttttaatcttattttaattttttatataatacattttcaaaggttgaatcacttgtaccattataattgtttaatggctctgccataacataactcccaaatattgatactgtagtaaaagattgcctcttattttataccttactaaatttgcttttataacactataaatcaattttctagttattatattatacttcgactttgaacaacataagtttaatatgttttacagtctttgtccaatagcaaaaaactattactaaaaatcacattatagtatccaactatatccataaaaaagctatattgagtttttattataacaaactcaatatagctttttgtaaaaatatcttataccaagtataagtcactctctatatttaatttatttattaaattttaatgctcctgtaggacataccattacacaaggtgaatccataccacacttatatctctcaatacaaccattacacttatttgccttaccatcatttccataaattaaggctccatattcacaagctttttcacaaagtttacaccctatacagttttgattgtctaatacaacgaatccttcttcttttttaaaacaatttttaggacatgcacctaaacattttggctcattacaatggatacatgctaatgaaaaatattctatattttcaccttcctctattgtaaatacatgtctaaaaagttcaccattgtctatattattatcattttggtctatacatgcaagcaaacatgctccacatgctgtacataattctttattaaatttaaataaacttttcattatatctctccatttatctattcattttttcaatcttacacttgcaacttctatacgcagggaatccactataagggtcaaaattatcatcaataatactatttatatcagattctctatatccatgatacatatgtatattcttatataagactctatcagtaacattgacttttacatccaaacttcctatcttagtagttatttttatataatctccactgataacacccaattcttttgcatccaagctggaaatatcacaactagcttcattttttaatattcttgaaagtttgatgtcatgaagtcttgaatgtagtgcatttgaaattcttgctcctgatgtcaataaatgagtatattcattatctatattatcattaaatcctctatatgttggtagtgcatccagtccaaaatctttatatttttcaataattgtagattttaattcaaacctagaagtgctagtatcatacccctctcttgtatatgagcctactatatatggcttaaaatctttacattttaatggtaaatcactttctttaagtttatctacatctacacacgtctttttaaacatatgtcttatacttgcttcataacctgcttttaataaatcatcatctatattcataacatttgctaaatctgaaagtatttctacatctgattttgaatcgtataatttatcaataacttttttggtatatgtaatataccctcctgggtaactcttacattcttctctctcaaatgatgtacacgcaggtaaaagtatatctgcatattttgatgtatctgtcataaataaatctatattcacaaaaaaatctacactatgcaacgctttaaaaagtctccctgaattaggaaacattctagcatttatcccatgacaaaacaaagctcttatttcatatggtgtcttttcttctatttgcctaggtaaatccatagcttgaaattgagttaccatttcattccatagaggaaatctttctccaccaattctttcatttatatttttaggtagaacttcttttacaaactctttttctagtgtttggaatccacctatcttaccagcaaagtaatcttgttttggtatgtttccacctattctatcataattacctgttatagcagataaagacatcattgctctatagttttgaaatccattttgatgatgaactattggagctgcactttcatttatacaaaatggaccttgtgacaacatctcaacagcttttactatattatctttagaaactcctgtaattctacttacagtatctaaatcaaataattttacatattctttatattcattaaatccatgtacatgcttttctatgtattctctatctattaaatccttttgtataaatagattcgccattccaagagctaaagctccatcagttccaggtttaattcttaaatgtaaatctgctagtttttgagttgtcggtgttattctagggtctacaattataaattttagacctttttcttttaattttattagattcacactatttaaaaatttagagtagtatggattaaatccccaccctaaataagtttttgcattctccatatcttgcattgtaaagtttcttccagtagcaacatttccagccatctgtgctgatgttgaacatgaactagattctgtaccataattaggtgaaccaaatgaagatgcaaacctttgcaaaaaaggtctataccactttccataacccgtaaaaaaagctacatgctttgctccatactcagattttactctatttaatttttctgctatttctctataagcttcatcccatgatattggtttaaattttccttcacctctttttccaattctttttagaggtgtttttattctatcttctctatatatatattctctattgcaaagacctttggtacataacaaccctttattcattggatgttcttttgtaccttctatttttattactttaccatctttaacatatgcatcaattccacaatgtactcctggagaacaaatatcacataaagtcctctttatttctatacctgtttccttacagggtattttagctttaagttgtctataactatccatattaacattttcctttcccaataataaatacaaattattatacttattatacattctttttattcaaatatcatactttatattttatatagtgcaatttctaagaatatttttaataataagattttatatttattaataatctatttatataattatttttcattcatagtttataagataattcaataaaaatctaatagtaaattgttatttacacatatattgtaatagataaaagctattcatatctgccttaattttagtcttaaatttagagtgtaaattgaatgcatttagattataatatatacagtgaggtaaggtgaataatatgaaaatagatatgatatataaactaataagaagaaatacagaaccatcaagatggtcaagaggtgtaaaatattatactaatcaattagttgattatatagacatagatattgatgacctacaaaataacctgttgacatttcgtggtggagtcaattctgaagataattatagcttttattttaattcaataactatagatataaagcactttaagataattgaaaatgattgtagttgcgctgactgtcaatcaaagggcaaaagtatttttatatgtaagcatatagttgctattgtgataaaaagcttaaaacaaataaaaaataaaagagatgttcctcctattctaatagatatattaggtgcagataaggataagctttctaatacaaattctaaaacaagcttagatttaagcaagcaattactttctttgttagacaatactaaaagagaaagggttaatttagatgtattgataaatgtggattcaaataaagcaattgctgaatttaaaataggaattgataaaatgtacattttaaaaaacattactgaatttgcatattcaaaacttaatggatatgaattagattttgggaagaaatttacttacaaccccaacattcattattttgctgatgaagatgagaagttagtagatattatagaagaatatgggacaaatctttcatacaacttttcttcatcacattcaaaaaaatttatggagataaatgcaagctctttaaaacaatttttaaatgctattaagtacaaggattttacccttattttttctaaagaggaatatcatccaaagatattaaatgatactctacctgtaaggtttgattttaaaaatatagaagataaaatagtcttatattctaaagattcactacctgttccacttactaaaaaaaatgatgtacttttatatgatggcaatatctatttattatcacataaaaaagctcatgattattcaaaaatatatcaaatattatcaaagactaaagagttaaaatttgataaagaggattctaaggatgttttaggattgctagttcctagattaaaatctatatctcaagaagttcatttagatgataacataaaaaataatataacaaaagattttaaatctgagttctactttgatatgattgatggcaacatatgttgtgatgtaaagtatatatatgatgatgaggataaaaaatttgtgctccccaacatacaaaaggaaactactattgaaaataaacttacttcttcacaatttacaaaggaaaataatcattatgtgtttaaaggaactgactatgacctatttacatttttagatttacaattagaatctctaaaggaatttggagatatatattattctgagaagtttaaattgaaaaaaatatataacgcttcatcaattcaagcttcaatcaatcagactaaccagaattacctagaatttaattttaatatatctgatataaatccaaaagagtacaaggatattttgaaagcttttcaagaaaaacgtactttttataaacttaaagatggaaactttatagatttatcagaaagagaaacaaaagatttttttgaattagttgaaaatctagatataatggataaatcaaaaaataataaaatttataaaaataaagctctatatataaatgatgtaatacgtagtaaaaatttaaagtttatagatggtaaaaaagaactagacagtatatgtgaaaaatttagaaattttgatagcataaatttagaaattcccgcaaatttaaatgcaaaccttcgtgattatcaaataaatggcctcaattggtttaaagttttagattattataaatttggtggtatattagctgatgaaatgggtcttggtaaaacaatacagactattgcatttttattatcattatctaataaaaaaagtcttattgttacaccgacatcactcatttataattggaaaaatgaatttgaaaagtttgctccagatataaaagttttattgatacatgggaataaaagagatagagaaaaatgttttatggaattagaaaattttgatgtaatacttacaacatatggtactcttagaaatgatttagaaaaatatagtgaaataaagtttgattattgtatattagatgaagctcaaaatataaaaaatccagtagctttagtaactgagtctgtaaaaagtataaatgcagaaaataaatttgcactcactggtacacctatggaaaataatctactagaattatggtctatatttgattttataatgcctggctatctatatagtaaagcaaagtttcaggaattgtttataaataaagaggataatgttaaaaacctgaaaaaattaataaaaccttttattcttagaagaagtaaaaaacaagttatgaaagaacttccagataagattgaaaaaaacttttttgttgaattgaataaagagcagaaaaagatatatagtgtatattcaaaagatatacaagataaaatgaaagataaaaatctaaagaaagataaaatagttatattttcttatttaactaaactaagacaactttgtttagacccaagtatagtagtaaaagattacaataaaaaaagttcaaaaattgaaacatgtttagaaatacttagggatagtataaacgaaaaccacaaaatattattgttttcacaatttacttctgtgcttaagaacataagtaaggaacttgataagtataaaattaaataccattatatagatggtaaaactaatgccaaagaaagacttgaacttgtagatgagttcaataatagtatggataaaaaagtttttttaatatctttaaaagcaggcggaactggtttaaatcttacatctgctgacatggtaattcactttgacccatggtggaatccatcagtagaaaatcaagctagtgatagagctcatagatttggtcaaaaaaattcagtacaagttataaaattgattgctaaagggactatagaagaaaaaataataaaattacaagaaagtaaaaaagagcttataaatcaatttataaatggagaactttctaatgaaggtgtattaaaaagtctatctgatgaagagataatagacttatttaactaaattatttaatcctacagcttaactatataaatttattctaacatttatatagttaagctacaatatctgaataaataaaatttcatattgttatttaatcccaactttacaatctaatgatatctctttctatacatattgcatatacaaatgtaataacttgactattagaatattttgttttaacaatcctatttcatcataataatgaagtatatgtacactcacttttgtaagttttgcaatccattttacagttttcattattgtaaattttggttaaattattcctctaaaaatttctttgctacatttgaaaaatctaatccattcgataaaattgcaggatgaccacctttatcaaacaaatacattttaccatttttaatcttttcaagaagtaatgaaaaagtattttcaaaaaaatcactagatattagagatacaaactcatcttctctacttcctgttaaaagcacctctggttgcatagtttctagaggcttatgaaaaaattttcctatagttttataatgttcaaaaatagcttctgtatcattatctacaactttttcccagttttctccttgattataaatataaaaagcttttgcaccatcatcttgctttgatgcctcacgctctattttaacattttgtacaaatgactctaaaggaacttctccttcaaaactatctgcaattaccttattcactaaatcaggtctctcaagtgcaacatttaatgcaacaagagctcctccactactaccaattatgtttacttttttatagttcattgcttctaaaaaacatatcacttgcatagcctcatcaaaccataagtcagcagaaaatttatcgaccatttgagattttccatgacctacaaaatcaattaatattactttatattcatctttataaaaatcgattatatcattaaacattttggaagaggctgtatttccatgtaaaaaaagtaatggtgtaccatccccaatttcattatagtagcactgtttgtcgttatagttaaaatatgccatatattacctcctttaatatccctataggtatatatttattacttatatttaaaatgactattgtcataaacatttaaaaatagtatagcttagaatgtagataaagtcaacattcctttccttaacaacttctattgttttttgaaacttcatttcgataacagaataattcataaatattgatactcttacttaaatatatgatttcatcatcagagagagcagtaataactaaattatcgtatatctcttttcactttaaccatttttttctttataggtatctccttatatttttttaatatcaaatctcccttataatttaatatatctacatatgaacataaatcttgaacttcaattacacctatatcatcattagttataccttttatattactaaatgcaccaactatatctaaaactcttattttcttcttcttaccagcatttaaatataatttaacaacttcactttctatatttagttttatatctttacttttgtaagaatttttatcaactttttttctctttgatactttttttaggattccttttgaatattcttcaaacaaaattttgccatgtgtaattctacttttttctatatcttttaattcatttactttatatcctatatacgtttctatattctctatatatttttcatccttttcagttactatagtaattgcctttccactatttccttttctcccagttctacctattctatgtatatagttttctttatcttgtggcacatcataatttattactaaagaaatatcatcaatatgtattcctctggacgctacatcactactaactaatatattaaatttttggtttttaaaatccttaattacaaaaattcttctttcttgtgataaatctgcatgtaactctcttattaaaaaaccctctttactcatcttattatataatttagatactttctctttggtattacaaaatattatcacactctttggattttcgctgtatattaattcttttaaaaggatgtacttctctcttccatttgccttgattattttgtcatctatttgtcttgttttttgattagtatcgctctcattttcttctatatttataacactgtaatctagcatatatttttcacatatatattttatctcttcatctattgtagctgaaaaaagacttactattttctccttaggtaaatttaataatattttttccatttgttcaacaaaacctttattaaacattttatctgcctcatctattactaaatactttacattttccaacttaatagaacctttatttatatggtcaagtattctgcctggagtagctacaacaatatgaaccctttgtttcaattcagctatttggtcttttatagattgtttgccaaatatagcactacatctcaccttctttagtctccctatatctgatatctcatcttttacttgcaaggctaattctcttgttggaaccactataagagcttgaatattattgcaatctacatttatattctcgcataaaggtattgcaaaacttgctgtctttccacttcctgtttttgacctaactactaagttttgaccttttaataattttggaataacttctctttgtactctagaaggtatattatatcctaaactcttcaatgacttaagtatcttttcatttaacttaaatttttcaaatgtatatttcatatattaccaccttattatatttatcttatctatatatttttctacattatattattataatacaaggttctactatttttatattatttattagactgaagataaaaatatatactctataaacctatagtttagtagcaaatcaattaaatttttatatttaaatacctccttaaatatactgataaatcaatatttaggaggtatctcttgtcaataatcaaactaatctatattttgaaagtttaaattatactaatacattgtatttttatttatatctaatattaaaaggtattaatcaatacctaaatcaccataatctcacatatttatatctttattcaatataccttctgtaatcaatcgtgctatataatcataacctgattcatttgctttgttacaatcattcacattatcacagaaaaaactttcaatctgtattgcaactggatttgtatttctcaatatatataaattttctctttttttagctcctctattttcaaataattctccaagtctattagatactcttttagcatattctaatccttcagtgccatagtaaagcacttctgtaccacattgtgttccatcagctttatttaaatgtagctctactaataaatcgtatttaccactgtttacttttggaactctatagaaaaattcttctctttctgacataaagtgcctttctggacaaattattacatctactgtattaccttgacttataagcatctcagctaacataggagctaattttttattataattgtattcatcaactataccatttacacctgtacttttaccaccttttagtatactatgacctactgttatgcatattttcatttacttttttcaccttcttttaagccaatttttatataatagtaatataattttaaagttattactaataataatatattaattgaagaaggtaaaagttctccgtgattatcatttttttaacatatttgtcttattttatcataagtctatattttttaaatattatactatacttattatttataattgtttaattaatcatttatatatattataaatatatcaatatctattttcctttaaccaaatgctattttaataagtttaagttttagctttaaaatacttaataatacaataaaagtgatgtatttacaaataattcttctggatttaattcatttattgatgtatgttcaatttttatatttatatttttcatatcttcataaataattccaactggagaacaaatgaaacaagaaaatccaaaagtttttgttattttttttaccttattatcaccaaaacttatttgctttttacaatcgtttatattttcattgttattttgtatatcatttttataatacttatcttttttaatatcattaaacttatttactgttttaaaattactcctatttttacaactatagtctatttcaacttctatacacccaaaaactatcgagttacataatttcaaattactacctttgtttataagatttttcataggtttaacatcaaatattttactatttacatttacttttaatatatctcttagatttttaggagcttttaaagtattacttatattcaattgtttgaatacaattttatttacattagtataaactctattactttctattgatattcttgttgggaatttatctagattacacttataataatagtatatattagcactattctttataatcctatgtgcagaatttggtaaaactacactcttaaaagatattatttttttacaacttgcatctattctccctatgtaaaaaccttgctgtgggtctaatccacgttttataatgccattaacttttacagtattatttataaactctatatatttagaaatataatctttgaaaaatatatttccagttttgtacctacttgtatttgtaacaataatagtgtaggtcaaaatctcaaatacagatgcacattttttatcaacatatttttctacttttataatacttccatttgcatcatttgaaaatacatcattaaaagtagttttcgttattctcattgcatccacctttctataatttaaagattactctatcttggaactattttcataacttataattgcagtaacactaataaataaattatcatctaaaatagatgaagtaatatcttgtataagatactttaaattaattttatctttattttctatctttctaggcatttgtataaatgtactaaagggtatttttaatttaaatgtattttttttactagaatttctatttcttttattgcctgcataatctaatgttacatcagtatctatatcgccaactaaaatcaacttctttcctgtcatttgttcatcttctgacgatatacattccatagtatcaacgagacttatgctatgaatattcatattataagtagatgtatctaatgagtttattacagtttttttagaagttaacttaaagtttttatatgtattaaattgagataaataaagagcattttctagcttttcacatctttcaaaattatatattaccttattattttcatacataatcacatcaatctccctatatctatatattaatactattcataaaaactatttcaaattaccatttttgattattcacgattcagttactacttacttttaggaaagaatataaataatagtgactatactaattatccagattaatatagtcactactttaatacaaactaaatgaatattatattattttttacttgaaatttaaacaatctttattttcattaaatctattattccggtttatatatgactttactatcagcatcatatattaccaaagaatttgcttttatgacttcatcattgtacttaatgtctttttgagaaaaattaactaatacctttaaatcttctccatattcagtcatttgaactagtctatcctcagaaataaatttaaagtctgtcatttcttttttaatagctttcttattaaacgctgaccatactttattgtttgagattatttcatctttatgtttttcccattcagttctatctatataatacataggtggtgtattatataatacttctttcatcattctacttccaacttcatccttaatcttcaaagttccccataaccactgatgggaagatatcacagaatcattataaactaatctaaataaaggtagagagtaaattgggtctataaatatttttttgtacctttcttttacaggtatctgctttgaaaatatttctggtactcctcctgttggagaatagtatttaccaacataatattcactgcctttattcttactcatatctttatctacccaagcaaatgctggtgtctcaataccatgtgcaaatgctatagtactacttgaaaaatcatttccaccttctgaacctatgaccatatttgcatggtctcttatatatgacattctttcaagtctagcatttaaatcttgtgtttgtgttgttatatgattttgagaataatcatcatagatttctcctgtagcatcacaatctataaaccaagaattaaattcatatccttcatccaatatactttgtactctctcttttacacttggtaaagacaatgtaggatttagttttcttccttctccttgaaatccagtttctttttcaccttttttattttctatggtagcattttcatatagagatttatctttaaatgatgctgtactccacttttcttcccctggtttgtgtatagagtggtatgaatcatatggccctacgagataacctaactcattagctcttttaaccatctctaaggatatataaccttcctccatatcatcaaatcctatccacgcatttttaataccagacttattaatatcattaattacatcagttgtattatattttgcccatgtagcaacatcattcacgctctcttccaattttgatttcaataatttcttattaaactctataagttctaccctacttaatttagatatacctttatctaatactttttttatttctctatctttgctttcaaaaactttttcattataaaaagtattcatctgcataacttcattaaatgcttgtactatttgatttttttgatatttatctatataatcttgagtttttatttgattaattacttttataaattcactattgccagacttcatacttaaaagctctttcatccaattagtcaaatcatctgataaattttcttttaatttattccattcaatatcatttattgtgatgatagacttatctccaaaataaatatgtggtgctccataaagtttttcaatatttttattttccttagatttttcttttaatgttttaaattctcctttatcaactatataatttttataagtttttgctacatctgtaatattcttattagtcaaatatattttaaacccatactccttatttttattgatacttggatattcatgtttaaatgtaaaattaatcttgtctttagaactaaattcaattacattgttaaattcattttcgataatataaatcacagaatactttgccttgtttactgcaaagaattgcattgaaaaagattctataacattataagttgactcatttagatactccttccaatacttatcattacttggtataaacttaccctcataaagtggtagtatataactttccccttcaactttgggccaattaaaactagtttctttttctaaattagatttaatatttacatctaaatagctgtcctctttttttatatttatgtctatattttcatcaggatacgtccacgatgcctctgtcttattctttttaaaatttgatactttcctttcttttgagggttcagatatcttttcttttgaaccaccagattcaactgatacctcaaatatttcaggtttcacctcaaaactaaaatccaaatttttaacactattgataggtgatgtattttttatcacctcaccactactacatccagtaatagtagttacaacaaccatacaacttataaatatcgagaatatttttttcataaaaaccacctcctcgataaatatatcactcctatgttacataaaagttacacttcactttgaatttcgctgtctattaattgaagattatactgttgaattaattctattagacgagctgcatatatactattgccattttcatccttcgcagtactataacctgccttttctaatgctttagcttgatatatatacgtttttgcatcaaatacaccattgtttttataccttttatttgtggctaaaaattttgcatggtcttttatagattcatttttatcatcatatattctaaatttatcatctataattgtatctaaatgttctttcgtttctaaagtcactgacttacctttccaataagcgtcagcctttataccaaatagattgttatattgttttgccaaagttgacttgccccagctagattctattatagcttgtgcaatagttatagatggaagtattttataatccttataattttgtattgcttctgttttaatttcagcaataaacttcatatattttgtatcagacttcaatctttctggttttataccataatccttaagattgtctatataattatcaaccaatcttttttgtctattactaaattctaactcatccaaaatatcacttaacttatttattttattatttttagaaaaattcttaacaaataaatctgatacttcttgtatctgtgaatccttaacgttttttaagttatttttatttaacacagcaacaatggaagctacatacttccagttaacttgtgcattatttttacttgctaaatcagcatattttatatacttactgacatttatatcatccttttttatctctctagatgaatattccttcactaatacacctattaaaattgatattatcagtattataacaatgaattttttattcttcataaatattgtcctcccttatactatctgctgaatataatataccttacttttgtgacatattctttacgaaattttgaagattttatgaagatttatgaaatatatttaattaaaggcactactattgttataatatatagttttctatcacacaaaatagttaaaatagataaataattaaataaacttattttaactatttatataataaaaatattattaaatctacttatcaatttttatatatttttctaatatatattttttcccatatacaataatttttattggtttaccttttaaattttctattttaattaaatcactacatacatctacattaataatattatctctataatttatattgaaagaataatttttccactcttttggcaacttagggtcaaaagatagagtttcattccatgttctcatgcctgcaaatccatgtacaatggaaagccatgaaccagacattgaagttatgtgcagtccatcatttgtatcattattgtaattatctaaatcaagcctagctgttcttgagtataattcataagccttttctaggttatctatttctgaggcaataatagaataaatactagaagataaagaagattcatggacagtatatttttcatagaagtcaaaatttctctttttttcttctttagtaaatctatttccaaaatagtaaattccctgtaatacatctgcttgttttataaaacacgacctaagaatcttatcccaagaccaattttgattaagaggaaaattttcttttggtaaatcctttacttctacaaattctttatctaaaaaattatcattttgaattattatttgtagttcctcatcatacggcagatacattttatttgatattattttccaaaactcaacttcttccctagtcacattatttctgtcaatacattcattacactctttctctaatcgtaagatattttctacagcataatctaaacaccatttagctatacaattagtataccaattattattgatattgttttcatactcgtttggacctgttactccatgtatcatatacaaatctttttttgtagacaaatgaactctacttgcccaaaatctagctatttctattattacatctattcctttttcttttatatatttatagtcacctgtataatttgtatagttatatattgcatatactatacttccatttcggtggatttcctcaaatgttatctcccattcattatgacattctactccatcaaatgttaccattggatataaagcacctttaagccctagtttttttgcattatcctttgcctgttctaactgattgtacctatattctaaaagatttctagttacctccttatctgctacacctagatatactggaacacaaaatgcttctgtatcccaataagtagctcctccatacttttcaccagtaaatccttttggacctatatttaatcgcgaatcttctccataatatgttgaaaatagttggaataaattatatcttataccttgttggctacttttatctccatttatttttacatctgcactttcccatcttttattccataactttgtatgttcatttaatatatcatcataacttttagatagttctatatttaaaatgtcttcacattttcttaatagctcactttccttataatctctagttgaagttatagatacatatttttctatacttgcaaccttattttttaaaacatccattgttatcgaattttcacagtaattataatcactctcatgagatacagcttctacatcaccatttgtcttaatatacatcattgaacccacagtgaatactggtgtattaaatgcattctcctttgttcgagaaagaatactacctttatattctaaagaacttgaagaaattccattccaaaacttttcctcatagtttgaatcttcattttttatatttgaatctaaatatggtacaaattttattttagtattagaatttaatgattttatactatatttaattactgcaagttccttaacagatatacttaaaaacctagtaaccctaacttcaaattttttatcatttatatttacaataaacctacgatttaaaataccatttttcatatctaattctctataaaaatcttctactttacattttgctaaatctaattctacatcatctatgaaaattcttacacctatatagttgactgaattaggaattttaccaaagtattctggatacccatttttccaccaaccaacacgagttttatctggaaaccatactccagctatataagaccccttgtgtgtatctccactataattttcctcatagtttcctctcatacccatatatccattgcctatactcattatggactctgctaatctattttctttgatttcaatcttatcttgtataatcttccactcatctacattactaaataaacatttcatataattctcctaactatatactcattatacttttcttgtatatattcaaactttaattgatttgttgaatctacaactaaatttgctttttttaagttttcataatttccaacaccaacagaaaacatattagctgagtttatagcgtctatacctgcacttgcatcctctatccctatacaattttgtggatttacattaagccctttcgctgacataagaaatatctctggatgtggtttattgtttttacattttcctgcatcagctataaaatcaaatttgtcacttatacccaaatgatttaatacatttattgcattcttacttgcagaagatagacctatctttatattattagattttacatcaattaacaagctttctatgcctggcaaaatatcatttgaagttatctcatctatcaatgatacatagtaattatttttttcttcagccattctcactttttcttcttctgaaaatgaatatttcttatttccaaattctaatatcctgtccaatgactccattctacttatgccttttaaagattcattaaattttgtgtctatatctatcccaactttatgggctagttttctccaagccatatagtgataatatgcagtatctgtaattacaccatctaaatcaaatataaatgcttcaatcattcttatttcctctttctacaagaaatttttagactaataatcaatttattttctatcttgtatttaagatattatttataaaattatctactctaactcagtctttaatttaaaatctactttcaattcactcacttgtaaaccatatttttttatgttttataaagacttgtttaaactgtataataatttaacatgaaatctaaaataaatactttttgtattattttaaaataatgaacttgtatttctctaacattagttcttcttttaaatcaactatttcttcttcatataaatcttttacttttttatttgctaaataatctggtaacgtcaaaattatatttttagatgaattatttattattatagaaatagattcttttttcaatataatcgttccattttccttatctgctaacacccattcatttgatatagacctaagttctttattttctttacgaagtctaataatcttcttcataaaatcaaatatatccttattccatttttcttcattccattccatacattttctttgaccttcagatattgaacttaattctccttccattccgatttcatcaccatagtatatacaaggacatcctgtttgtacaaacataaacatatatgcaagtttaaatctatcaatatttccattagcataagtcaatattcttgtagtatcgtgacttccaagtaaattaaaaataacttcactaacttgtattggataacttaccattacatcatttatcatatacttaaattcttcggcgtttatctcatctgtacaaaagaattttttcatggcttctgacatcaagtaattcataactgaatcaaattggtcacccattagccatggtaaactaccatgccaaatttctcccaatatataaatgtctggttttacttttttgacttcttctctaaactttctccaaaaaacatggtctacttcatttgaaacatctaatctccacgcatctatatcaaattcctgtatccagtacttgcctacatccaataaatattttattacttctgaattttctgtattaagtttaggcatatatttttcacacccaaaggtttcataaggtatatttttttcatctatctgttctattggagtatcaattttactcatatcttttatataaaaccagtttttatatcgagaattttccttattttgaactacatcttgccactgtttagaataatatcctatatgattaaaaacagcatccaacattatttttatatttctcttatgcgcttcttctattagtttttttaaagtctctttatctcctaatgtagggtctacctccatataatctaccgtatcatatctatgattggtttttccaattgtaatagggcaaaagtaaattccgtttattcccaaatcactcaaataatctaagtgttctatcacaccttgtaaatctccacctgtaaaattatctctggttggaatagctccccatttatctactccttctgggtttatagacgggtcaccatttgcaaatctatctggaaatatctgataccaaacagtatctttcacccaatttggcactttaggtatatctatataatttaaatatggatatccaaaaaaattacctatttcacataattccttttcatcattttcatttcccaactctattattcttttttctgtaaataaaagtttttcttcttgaccttctattataaaaccatatcgtgagcgtttatttaaaggcttacacttagctatccaatagtcaaataattcagtttctacttctttactcattactatatttgttccaccagaccaaccaactccagatgcatttaaatttcctcctcctgcacctcctttatcccacacatattggtctcctattcgtaaaattactcttttcgcttcattttttttagttctaagtcttatatgtagtgtttctctatcataaccataggcataattgctcattggtatatgtaatatagcttcttttgttaaactattttgaattgttcctttgatttgattacttaaagttatattttctttatttttattaaacattttaaaatttccctcctttataataatttatataatctaaagataggttaatatattttactattatatcacaataaaaatatataatagtaaaatatatcaacaataaactattcaatttaaaataaactatactatttaaatttaattctatttagttattttagcaaaataaaaacctctagtatttttctagaggatacaatattataactattaactttttaactatccattaatttacttcaaaacatactctaagctatattgttagatttaactttttttatatttacaaaataagtttctctttctttaaataaagatacatatttaaagtcaagatacttaagcatatcataggccacatcaaaatctttacatatatcttctaccctatgagaatcagaacctacagtaactataaatcctccaagttctttatatctttttagaatatcttcatttggatgtatagcatttaatccatatctataaccagaagtatttagctctataccactcccattattgattattgactttaagacctcatcaataacatctttaaagtcattgtatataactctattatctgaatatattccatacctagatatataatccaaatgaccatatatattgtaatctccaaattcacgattagtttcaagtatgctattaaaatatttataatacgcatcttctttgctaagacctttaaaatacgcctttgatggaacaggtacattgtcaattgtatgagttgagcacaatacaaaatcaaaaggattagaatttattatttcttctatttcattttttagatgttttctgtaacctacttcaacacctagtaataactctatatcctttttatatttttctttaaacttattaaatactggaacatagtcattataatttatgcaaaatcctctatcttcatcatgttctaaatggtctgtaaaagtcaaatatctaacaccaatacttatagctttttttattgtatcttccatggaatcctttccatcacttgaaaaattagtatgaatatgattatctattaaattcatattatccctccctttattttatctatcttaattatacaacaagtttattgtatacatttgttaaaagaaaattataatggttaaattttatttacatacttttatttttacaaaaaagagaagcacctatttctgattttagaaaatcattaaggatacttctcttaatgttacttttatatacttcaatttaatttttaaaagtcttaattttgtaatagagtttagctgttatatgtccaatcatataaaaagctgtataaagtaaaacatatatatatgcagaatcatttaaaaatatatacattaatactatataagttactaaagacacaataagagataaaatccaattagtcttatttaatacacaaattatcccttgtattaaaaaagaaattggaaaaatcaaaaccattcccacaacaaaaatacttttagattgaatatctggaatattaaatatatctgtagcaaaagttaaaaacattagcaccattatgattgtaggaaatatgatactaaaaatattactctttttcataataatcaatccttatttattggatatttgataatcttcaattattttgttgcctcaatttctcccatcattcttactaaatcttgtccatattgacctccagcccaattattagataaactttcaactgttttagccttaccaaataaagatttttcatgtctagggtctactggatttgaaagtgggtaaccatcttgtcctgcatataagcataaatgttgaatttgagctaatattccttcttcccaagtatcaaatcttgaatgggcattcttatcagtatcagaaccacctacagaagttttaagtccacaaggattcttaaatgatgcatctaatactccaccaaaattacaaaaaccagtttcttttgcagattgagctactgccaaaacaggattaacaccttcctgaacagcagtatcatataatattggtattaactctataaataaatcattagcttttttagattttgcccattttaagcacgcttctaaactagctgttggctgacctaatatgcttgtctcatttttcataggtgactcaccttttgtagacgaatcgccattattttgtgcagcagaaacacacttattatacacactgtcacttattgaacctaatctagtaatcttatctgctcctgctaatatagacttatcactactttctgacaccaatacaattggattttccttagcaattgtagaacctgtaagtgcatttactaaatcatatccatcactcaaataaaattctgatgcatctggataaaactcttttataactttcttatttgtatcatatctatctgaaccaccaagtcttttagcattagttttattaactaaactagtgctcattgatatactcccacctactgcatatgtttttacattgcttgttgaaaaaggcacactctttccatctgtaagtactataggagctatatctcttactgatacgggtgcagcacttattgtatctgcttctcctttatatgcattagttaatatcacttcatcaacttttttgataccatttacctctttagcaacactataactagtctttattctgtcatctccacccaatctagttacctgtgcccctgtgttttttagttcagtttctactgacttacttattgataattctttacctattatgtatatctttttaacattttttaatctttgttttgtttcatttggtatcttatttttttgtgcaagcaaaattggagcatcaacagcacctgcaagaccacttgctgaaagaccatctgctatagaattatccatatttaccataattgctgtatcataactctttttatctgctattaatccagccgtctcatatatattgttacctttaattgtatctgatgttaatgcatctacattaggtacatttattagaaatatagctaatgttaaacctaatgctaaaactcttctaattgttctcatattcttcccccttgatatatcaagtttaattcaaaaatgactataacatagtattacatctacgctatagtcatttattataatttaataattatatatttgttattatatcataaattacaaaaagtttccataatattgtatagattaaaggaaaaatttacattttagttacaatttactagatttttgttctaatgtacctatatttagtaacaatttgtaataaaaatcgatatctatattacatatttaattcactgttttacaaaatgaaattttattgtatacaataaatagattatatgtttacataatctatattatttttaagtaaatcttttatcgatattattaagaatatatattacatcaagtttattacgtgcaaaccactatcaacttaaatacctaaggtaacacttgaagtagtagattcttggtaacaataattattgctatcattatctttttttaattaagtatttactatttatatatcaatctacttttcacttttaatttaattctaacatttttttatatgttttatgatatataatgtgatatattctaattaatgatattttcaagtaaaaaaatgttactctattataaggtgatagtatacttgaaaataaataaaacacttaactttatttaaggagatttatgatgagtaacaaacaaggttctaacatcaaagatgtaaaaattaaaaataagttaataatattgaaattactttctacaaatacacctatgtccagagttgatttagctaagtctacaggacttactaaaatgactttatcaaatctagttactgaacttattaatgaaaatatgattagggaaatagagtcatcaactttaaatgcacattcatcaggtcgtaaacctattttattagatatttctaatatatcgccttgtatttgtggaatcctaataagaagaaatatatgtaaggtaattatttcagatttaaaaggtaatattgtaaaacaactttctgaaacttaccctaaatgtctatcaaatgatgttttaaaagatataataaaaagaatgtttactaaaataatgaaaatcaacaagagagatataattggaattggtatttcttcaataggtccagtagatgatataaatggtaccatactaaatcccccagactttggaaatgtatcaaacctaaatatagtagattttataaaagaaatgtctgattttccaatatttttgataaatgatgctaattcgggtgcattagcagaaaaaatgtatggtttaggtaaaaatatatcaaattatatatacctacacataatgaatggtattggagctggtctagttctagaaaataaacttcatactggcaacctaggacaaagtggagaaataggacatacatcaattaattttagtggaccattgtgcagttgtggtaacaatggatgtttagattattatacaagtgtcagtaatctaattaaaagaattgaatcattgagccatatttatcctaactccccattaattaactgtaaagatttttctttagtcaagttaatagatgaggcaaataataaagatagtcttgccatgtttttgcttgatgaattttgtacatacgtatcatatgcattagttaatacacttacattgattgattgtagttctataataataggctatgactttaatatacctggtacatttatagaaaatacattattaaaaaaattgactgcttcagcaagtttttctaaatataaaaaaataagtgtaaggcattcaaattttggagcaaatgcaccattaattggctctatagccattgtaagttataatttttttaatggtagtataaatttttattaaatatgtaaaatatttaaacacttttattgaatatttttccatttaatattattatattttataagagcatttaaaatttggaggtataaaaatgatttcagctaaaatggaaaaattacttaatgagcagattaaccatgaattatattctgcgtatctttatctttctatgtcttcttaccttgaagcagaaggacttaaaggattttctaattggttttatgttcaatataaagaagagacagaccacgctatgtttttttacaaatacttacataatgtaggaggaaaggttcagcttgatgctatcccaatgccagattcagactttacttctgcaatggatattcttgagcgtacgttagctcatgaaaaaaaggttacagctttaataaacaacttagcagctgtagcaaactctgaatcagactttagaacttctcaattcttactttggtttatatctgaacaagcagaagaagaaacaaattgtgaagacaatataaaacgtgttaaacttgctggagagggtggtctattctttgttgaccaagaatttgctaatcgtacatatgcagctccaacaaacccacctgtgacaatataacgtttaaaaatttttaatataataaagaaggtgttttaatgaaaatcaagattgattcttatcattaaaacaccttttattattcgttttatacgtagtattttattgtttatacagtgctatttcacaattaaactcaaaactatactttcattttaaaatatttttaaattaaatttggggtgactgaaaatcacactatctaacttacaaaatgtgattttcagtcggtgctttaattatggttgaataccaaaacttataaactatttatatttaactattaaggcatctactgcacatacgccttttcctttaggatatacaaacactggatttaagtctatttccttgacttcatccttattttcataagcatattttcctaatttgaccatcatatctgcaagagcatcaatatcacaaggctcacttcctctatagccatttaaaagcttaaatgattttagttttttaagcatcataatagcttcatcatgatttataggtaatggatataatgtagtatctttaaatacctctacaaatactcctcctaaaccgactaataacattggtccaaattggtcatcattagttataccaataataatttctataccactttctaccatttcttgaactaatataccatcaatattagcatctggttttgctttttttacattagttaaaatctcattatatgcatctactgcctcatctctattcttaattcctattttaactcctccaacatcagatttgtgcaatatttcagaagaatttatttttaaaacaacaggatacttaatatattttaagatttcatctaattcatcaatactttttgtattaccttgtcctggaactggtactccatattttttcatctcaatcttactatctaattctgataatgctactacattatttgactctcttttcttaacagctttaaattctaaagttctttttgaataatcataatctataaacttagccattttattaaaacaagtaaatgtagttccaactgatgacattataggcacttgattatcttctaatctagtcctataatctaaatatctatttccttcaagtgtaggaactgcaaacacaggttttttcaatccttgttctctagcttcacttacagctttacaaagggtttcatgcatttcattttcttcatctcttatatttgcacctaccatagtaaatccaacactatcatccttttcaaaggtatgtaataaacctactatcatatccttttcatggaataatgctgttgtagcatctagtggatttttaggtgttgcaaatcctggaagatattttttcatttcttctttagtttcagaagatatttctgcaagttctacaccattttcttctgctaaatctgcacaaatagtattttctcctcctgagaagtttattgctgcaaaattagaatttgcaggtaaattaccatctaaaacactaaaagcttgtgctaaacacataaactgttctaaattttccacagaaattactccatatttttcaaaaatactttcaaaagctttactcgaaccagctaaatttcctgtatgagaggcagcagaaatagcacctttttctgaccttcctgatttcaatattattactggctttcttttttgtgctgccctttttaaagcatctataaatttttgaggattttttaaaccttcaaggtaaattgctattactgatgcataatcatcatctacaaggaaatctactgcatcttctagtgtaactatatttccatttcctgttgaaaaaccataagatatattaaaataatcacttgaaacaatttcagcagttataaatccactttgacctacaattcctataccaggttttttagtatctaaagcccatttagaacctcctgcccatagattaaccttatctatacaatttagcaaccccatgcagtttggacccaatattttcatatcgtatgtatttgatatttctataagttgattttctaaatctgtaccttcctctgtaccttcctctgcaaatccactagcatataccactgctgcctttgttcctaactctccagaatcttttaatacagatggaactacatttctaggcgtacatactactacacagtctactacttctggaacttcttgtatcatcttataacattttctcccaaacaattcttctcttttgggattaacataatatactctatctgtttccttactttttactatactaagtgctgcacttcttccaaaaccaagtttatcagtcactcctactatagcaatactttttggtctaataagtttttccaaactcataaattcacgctcctatatgtttatagttgtgattttaagtgaattttatctcaagatgaagtttctcttggcactaaagattattaaatcttgagataaatcacttaagataagggtaatttatcaaatggcgttattatagccttccatgaatgctgcttcattttgaacattaaactttccttttcctttttcctcaaagaaatcacacatagtttttaaagctaattctttttcaagtaacccagttttagcaattaatgctccaagtactactatatttgctgcttttggattgtttactttttgagctaattcctgacaatttattttaactacacttatatcttctcttaatgttacattctcatctattgcagatgtattaataactactgttccaccttctttaactaaatttatataatctaaagatggtttattcattgctactaaaacatctatttcttccatatcaggcccacctatactctcatcagaaaactttactacactataggcttttccacctctcatagttggaccatatgcaggcatccaagttacttgtttccccaattcaagtgctgactcagctacaatcagaccaagagttaaaactccttgaccaccaaaccctgcaaatactagctctttttccataactattcaccatccctttgcttaaattcgccaagagcataatatggcactatttcttcttccatccatttgatagatttctctagtgatacaccccagttagttgggcaaggtgctaatatttcaactaaggaatatccctctccatttaattgagcttctattgcattttttatatatttttttagattaattatttcctttgggctatgaactgaacctcttgctacatatgctacatcaaagaagtttgccaccatctcaggaactttcagtggactaccagtagtctttatatctcttccatttacacttgttgttgtgacttgacccggcatagtggtccatgacatttgtccaccagtcattgcaaaattattattgtttattacaaatacagtcacattatgatttctatatgctgtatttaaagtttcagaaagacctataacataagcatctccatcaccttggtaagtcattactaatgtatctggaagtgctactttaactcctatagctgtagatgaagctctaccatgtgcagtttgcatcttatcaccattccagctaaaattcatattgcagacacaaccaactcctaatgttaatacatgatttttttcatatccatgttcttctattacctctgctattatacgatttactattccatgaccacaacctgggcaaaacttgtttggtattgaaacaacgctaggtgttaatttttctgtagccatattagaacacctccttgatttcgccagattttattttgctataagtgtccattacttgcaatgtttttggtatatgatttccactaaataaaccatacacaggtacattttctttacatactttctttgaggctaaagcaacatcttctactaattgacctgtgtctgttgattctactgagataaatccttttacatctttacttaccttttcaaatgctttatatgggaaaggccatactgttattggtcttattattccaactttttcaccttgttctctaagtcttctaacagcattcatagttgttcttgatggtataccgaacgctacaaacacatattctgcatcttctacttgataatcttcccattgttgttcattttcagttattctcatacgtttctccatacaaaaagttggcttttggttatctgcaacctttgcatggtctctattacttccatcataagtccaacctaaatctccttctctcttcttaaattctggaaattctactggttccatcatttgacctaaagctgcttctgtcaaaatttcgacaggcactctgtatttttccgctacatcaaatgagttatacatcaaatctacagtctcttgaatactgtttggtgcataaactatcaaatgataatctccatttcctccccctctagtatctcttagatagtctgtctgtgctgagtccaatgagccaagaccaggcccccatctctgtacatttacgattacacaagggtaatgatttgcacataagtaagaaatcccttcttgttttaaagatattcctggtcctgaagaactcgtcatagacctcattccacttgcatatgctccatataccatatatatagcagccatctcattttcggactgtataaaagttcttccaagttcagacattctatgtgataaaaattccattacctctgtttgtggtgtaattggatatcctgcataaaattcacaacctcctcttagggctgcttctgcaatggcgtggttccccttccacatctttttcatattatcccaactccttctaagcctcttgacatgctttttctttaattatttcaaaaacattatctggacacacctgatagcaaattccacaaagtatgcatttactctcatcaacttctacatgagcataaccttctttatttatcttacttgatatttttaatgctccttttttacaagatataacgcagtattcacaacttttacatctctctgcgtttatttttaagttcatatctacaccccgtttcataatatttctatctattatccaatacttggctctcctttaatatttaatatttcctttaaaactgctacaaatttcttattttcttccatagttccaatacttacacgtgcatgtgtagcacttggtcttattacaaaccctctttttttcaagtcttcaaataacttaggtatatctgttttcatatctacataaaggaaatttgattgtgaatctacaacatcaaaccccatttttgtaaactcttctttaaagtaagtcattccaactctatttaattcatatgtttcttttataaactcttcatcatcaagtgctgctgttgctccacttatagcaacacgatttgcagagaaaggctcttttactgtaaataaagttcttattatctcatctttagcaataccatatcctactctaagccctgcaagaccatatattttagagaaagttcttgttactataacgttataattttcccttacatacttaagtccatccacataattaggaactgttaaaaattctatatatgcttcatccaatatagttataatattttcagggactttctttaaaaattcttctaactctttatcatccacaattgttcctgttggattattagggttacatacacatattaattttgttttatctgtaatcttatctaatataccttgtaaatcatacttataatcttctgttaaaggcacttctactggtatcccttcattttttatagttgcagttctatatgatggaaatgttgggttacaatatataacttcatctcctctatttataaaagcctcacctattagagtgataacgttatccgcaccattagcaacaataaaattttctggttttaaatctagcttttcagctaattttcttctaagttcgttagcttctggctctggataaagttgaccttgttttagcatttcaatcatagcttctattgcttttggtgatggtcctagaggattttcatttgaagctaattttattatttcttttacaccatatttttccttaactttttctattggttcacctggaacatattgatgtaattcttttacggtatttctcaataatttttctatcatttttaaaagccccctctgtatatgtattttgatttatataaacgctattgcgtctacttactttaatagcttaaattaaccatctacttaactttcttttaactaagcatttctttgatttaactcttctcttatttggtttaatttcttgtcacttactggatatagtattgctataacaacagctattattaaaggtattgccatagaataagaaatcatatttataaaacctgatttaactgcttctgtgactaccatatcagcttgatatcccattgagttcattaaaactgttcttatagtagttgcaagtaatactcctacttgtattgcaactggatatagtgacatacttaagccaggtaagtcttttcctgatttccaatgcccataatcacaagaaccggcaaagaaattaagatttattattgatactacatttgaaaaacctccaccaattgccagcaacatagttactcctaaagtagttttcccccaaggagtccatgcaaccaataagtggcatagtgcacatatagaaaaagaaattattgaagctagtttttgctctctacagatttttataaacactggtgcgaaaaacatgaatgctacacttaccaaaggcatgattgataaaaatactgctaatccacgttcatcttctattacatatttaaaataatatggagccaaaggtcctaatcctatagatcttatacatataagaaattctaaacaaaatgccatcataagtggtacattagtgaatagagcttttgccatttcacttgctttaatctttggcttctcttctttttgaagaacttcttcttctgctccagattttattatctctgttgaagaaaaccaaaatactaaaaggcatcctgctgcaaagaataagtaggtacctaaataacccattccttctccacctaatacatctgcaaataaaactaataataacggatatgaaaaacctactaagaatttaccaacttctttaaatatattagtagtagttgagcctataactcggtctctaggtgtcttagcaactacagggtaaatagcataaattatagtgaaaactacttgctgagcacaagatgctattaataataaagctgtcatcaaaggtaaaagtaatgctggacttattttcattaatggaactatgaaaaatattccatatgttaatgctaacgctgctggtgcatatctaagccatggataatactttccttttttgaatggttgtttgtcaaatactgtacctgttataggagctacagcaatttttatgaaagattgtataatttgcataccacctgccataattacaccaagttttgccacatcagttaaaaaaatatttgtaacagttgatacaaagtaacctataaaattgtacgctaagtttatagaacttgaatatgtgtatattgctcttttcttagggtctctcatatcatctctaaaatttgatataagatttccttttggtttgctttcttgactactcacatctacccctcccttataaaattttcttacttttcattattcacgtataataatatatattttgaatcttaaatatctcattcttgattcaggagtatatttttatatgtgtataattttaatttaattatattcttaaaattcataattgtcaaacactttttaagttttattttttactactaaaattaactaaaaagctatttaggcttaatttagatttgttttttattattttcttgtcttgaaatgtcattgaaatgcgtattttaaattattttatcatatttctagtgattttaaatttttataattttattcaagaataatttattcaagatatttctatactacatccagatattaaaaatatctttttcttatttagattccttttatttttatacatgtactattgatttaaaaataaaagcgtgttacaattacaaaaaagaatctatgagataaatatcaatatgcaaaaatttcagaattttcaattttctatttttacgtaatttccatctaatatcataaattattatagctatattaatctaaaaccaataaaacaaatatcgtactacttttatataaaatatattttaaatatattttatatattttattaaaatattttataaaggagaaaagactatgttacttttaattgttacgtgtgcaatatacatatggattggtttttatttttcaaaaaaagttaaaacagcatccgatttcctaatcgcaggtagaaatcttcctttgcctatactagctgcaaccattgctgctacatcttttggaggagggtgcttagttggtggagttcaatggggagctgaaagaggactttgggttggaatgtattctactataggtgcagctttagcttgctttataaatgcctttttcgcaggaaaattaagaagcttatcttgtgatataacacctgctgattatattgaaactagatatggtcatagtgtatttttaagagcttatcaaagtcttgtaacaccaatatctatactagctattatgggtagtcaattaatttcttttggttctgtatctactgcatttggtattccttatgatatagctgtaattataggagttatagttataattatatatacttatacatcaggaatgtggggagttgcagtatcagcatttattcaacttgctatttgtatagtgtttttgccaatagtagcttatataagcttaaaattagttggcgacaaccctttacttatgttacaatcaatggtaaaagaaccattctttccaggaaataaatcgattagtgattttatgtatacagttttaccattagttttaggctcaatattttcttatgaaagttttttaagatatcaatgtgctgataatgctaaaaatgcagttaaaagtagtgtaattgcaggatttatactattatttcttgccttccctataggaataattggagctattggtggtagtttatttccaaacatatcatctgttcaggttttacctcaaatgatatcgactactttgccacctttaatatctgtattattcttagctgctatattggctgccataatgtctactgccgattcattaatgacctcaatgagtgctattatatcaagagatatttataacaaattattacatcctaatatagaatttaatgatttaaaaaatactctaaagtattctcaaattgcatcagctttgacagctataataggtgcaatcatagcacttaaatttgatagtttattagaattattgttttggccggctccattatgtacaggtgtaatatttgcaccatttgtaattggtctttgctggaaaggcgctacaaaaaaaggagctatctatgctgttatagtaagtgttatattggcattattaaatatgattggtattcttactgtatttgacagaattttggttcctataataggtggttctattacaatatttatagttagcaaattttcaaaaaaagattgaaaagagaggtatacacagtaaatatgtcaaaatcagaaaagggcaaagaaacaaaagctagtattataagtgctgctagagaattattttttgagcaaggttatcataagacaacaactaggcaaattgcagaaagagctaatataaatttaggtctaataagctattacttctcaagtaaaagcgaaataggagctataatatatgaagatataagaaatgaaatgcagtctttaatctataactaccatgaagaaggtactatgatgatgttctttcttgctatgaatgctgacctttgtttccttctaaaaaacgaagcatatagaaatttttatttggatatagcttatgaagaagctattttaagctatcaaagaagtgtaaccgaaatggtcatgaaaagatatgttaatgataaagaatctatagaacatgatgaattaatactttcttgtattggtatacttgctatgaaacctgaaataattagagtttatacttcacacaagtacgatatatcttctcaagctgtaataaagcattttacaaaacagtttcttattaatcttggtcatagtacggatttatgcgaagagattttagaggaattgagtaaatactatatagatatagttgacaattttactccaataataactcgtgtaagaacttaataaaattttattaaattcttatagactgaaattttaaaatcataatttgattttaggatttcagtctttatcatatttaaagatattttatagtatacctgttaataccataagtgtactacccaattatatctataaatttctttatccataaattccaaagacgccattcatgcccccctacacactcttcatattcaacatctacacccagagactctgcatattttttaaacatctgattatttttatataaaaaatctctatcaccacaaaattgataaattttaggaatatcttcatttctttctttaaggttcttaagtatgtaaagtaaatcattctcactatttctagcgtcttctggtctaccaaaatcgtgaaataaaatgtctgcattggtttctatttgttgattttctaactcatgaatcatatcaggcgaaccagaaaaacttgcaactgccgaaaactcttttggttttgaaagtgctaattttaaagctccatatccccccatagacataccagctacaaagttatcttcccttttatctgataaaggaaatatagctctaacaaatttaggtaattcctcgcttacaaaagtaaaatattggtgtccatacgccatatctgtataaaaactagtttctactcttggtattactagggctatatttttatttttagcataatgctctacattagtatatctaatccatgagctttggtcatcttctaaaccatgaaataagtataatgttttaaatttaccttcaaaatcatatatctctttaccactaaaaagttcttttccatttgctacaggcaaaattacaattatatcagtttctcctccagtatatttagatttaaatttacattctataaatgccacaaaaaacacctcttctataataattttatatctaaaaagcaccaagagtttaactttctcagtgctttaaatattgcttaatttatatatttttaattatacataatattttttagctacatgtaatcggaagtatctgtcggtaatccctttttgtccaatttactttcaacaatatccttaattatagaataaattactgcaaacattggaactcctataaccattccaataaaacctaataattttcctgcaaccaataaggagaacaaaatccaaaatgcagatataccaattgaatctccaagtattttaggtcctataatatttccatctatctgttgtattattaatataatcaacaataaccagaaagcttttataggagatacaaacatcactattagagtagatggtatagctccaaataaaggtccaaagaaaggtataatatttgtaataccaattataactgatattaataatgtatatggcattttaactaatgtaagtattacaaatgttagaatacctataatgaatgaatctaatattttgccacctaaaaatcttccaaatgtatagttacttctatgagttaattctaaaattctggcagcttgtttttctgtaaatactgcataagttatttttttgcttaatccatagaatttttctttatcaattaataagtatactgaaacaattaatcctagtacaatattccatatactagaggctacattctttaacatacttcctaatattgggattaaatctgttacaaactttataatatatgtaacaaactcattccacttatcaactgccaaattaaagtattgctcatcaagatttaaatcagtcattaatttatcaataagcttagttgcattgtttacatacataggtatatcatttgctagtccaacaatactctcaattacttgtggcaatacgaaatgcataaataagtaaagtatcaatgtagctgttgcatatgttaataaaagacccaagcctctttttgaactttgttttagtttttttaatttctcactttttataaaaattctgtcttcataaaactttaaaataaaattaagaagatatgcaatagcaaatcctattataaaaggttgtaatgttgtaaatatagcatctaaattattagaaaatacatcaatttgtgatgatactagataaaatataatactactagcagctattataaatgtataaattgctattgttgtgtattttgtattccaattaattttcattttttcctccttatttctatataattaaattttatcacaaaatcaccacttttataacaaatataccaaattaaaaataaaatatattcagaatacaaatactcaattttatttatatttattattctacaatataacctacattatctttttaagaaccttaattaatttattatcgtatggagcatatctaatagggacatccaaatttaatttttttaacacactcttatagtgagtaaatgtatcgaatccagcttttccatgatatgagcccataccactttcaccaataccaccaaaaggtaagtaattcgtagctatatgagtaactgtatcattgatacaacatccgcctgctggaatcatttctaaaagtttattttctaggtacttattttttgtaaaaatataaagtgccaatggatttggcatttgtataattttttgtattacttcatctaaatctttatatgttaaaatgggaaatataggcccaaatatttcttccttcattatattatcatcccaattaacattgtctactatagttggctctatctttaatgtctccttattataatttccaccatagactatcttatctttatcaataagagataatatccgattaaaatgtctctgatttatgattttaggaaattgctcattattacatggattatctccaaaatacttattagtataatattttattttctctattaactcattttttctatcttcatgcactaaaacataatctggagccacgcaggtttgtcctgcatttattagttttccccaagtaagtcttttggcagtaaggtctatattagcatcttttaaaatgatacaaggactttttcctccaagttctaaagtaataggagttaaatgctctgatgctgatttcatgattattttaccaacattagtacttcctgtaaaaaatatataatcaaatctttccaatagtaacttttcactttcttcttgacttccttgaacaactgcaacatattcttttgaaaaagtattttcaactatgtctttaactacactagatgttgacacagaatattcagaaggttttaatataacacaattccctgctgctaatgaccaaactaatggtataagtgctaattgaaagggataattccaaggtgacattatgagagtaacaccataaggttgtggaacaactttggatatagatggaaaattaaccatacttgatttaactctttttattttgctccattttcttatattctttatagcaaagtttaattcactataaaacatgcctacctctgtcataaaaccttcaaaattcgatttatttaaatctttctttagtgctaaaagtattttttcttcattttgtgatacaactaacttaagtttcttcaactgttctatacgaaacgatatatctcttgttttacctgtattataatattttctttgcattttaactaactcttttatatccattgttaaaaatcctttctttaagaattatattaatacatttttagaaaaagatttaaatttatcctaacattattttttatatcataataaattcatctcaatataacataaatcttccaataaaaaaagccccttattaagtataagtaagcttataaaataatttattttaaaataaacattttttaaaattataaccttattgaaacaattaaattatccatctttaataatattattttataaataatgtctagtaagtttctatgaaatctaactttagataataaataattataaatatatacctcttaaagttttcttatataattaagtattggagttaaattttctttattacaccaatcaaaggcttctccagacaataaaggtgcttctgctggtttaagaccttgacgttcttttttagctatagattttttaaaaaaactacaaagagtataatctataaaagacatttttgtctcatcccatgccccacgacaataaaagcaaggaactttgtttaattcatccttaaagtttacttctcttaatttctttattacttcatcatcatatggagcagctcctacgccaaatactactaaattttttttctgcaaatctttataatttttttttaagaaagaaattcccgctatattacaagcataaagacctcctcctaaaataatcgtatcatacttcataaccttttctatattaatattcttagtttcaaaaatatcacaagacaataattctgaaagccatttagcatatttttttgttgaaccatacttactcttataaatcactactacacttttcatataaattacccccctctctgatgtcatacaaagttgatttgatacttgcttattctccaacgtcattattttctacataatttttcacattttcaattcctatacttaatttcataattccaaaaaataactgttccacttctttctctgtaaaatcttcaaataaaagctgtaatactttttcctgcatacctcttacttttttagaatactcttgcactctatcttttgtcacaagacagatagctcttgaatctttttcattttgctcaatttgtataaaacctttcttttctaaagcaatagctagtttttttacattttgtcttgagcaccccattaattctccaagtttggttaatgtaagagtttcatctacagagtccgcaatagctaaaagtaaccattgtttcattgttaattctgggtctaatttatcacatgtagtttgaagtttattttgcattacaaatatacttgcaaatatagcttgttttctactatcatcatctaccatatattttttcattaaactttctgcatccattattatacacttctctttatcttagattttaattttttgataattttaaatagtaactagttactttatattatagtaattagttactattgtgtcaataaatttatttttattataaatggcaaaacggcatagcattatggctataccgtttcataaaatcatatttacaatcaatttataataaattataaattaaatatattttaggctataataagtttttcaaaatttactctaaagcatactttttatacttattatattctatattgctacattctacatctaaaatagctccatcttctctgtattctgtatttataatgctcgtattttcgttaaaataagaaactacatgacctttatcatatggaattaagaacttacatcttacacaatctttaaatatgctatcacaaatacattttatcattttatctatatttatatcttttttaactgaaacaaatataccttctttatcgatactatctaaaattctatccaatacttctacatctattaaatcaattttattatacacatgtatcataggtataccatctgcacctatttgttttaaagtatcttctgtcactttaatatgacttttatagcttggatttgaaatatcaataacatgtaacagtacgtctgcctcacatgcttcttctaatgttgacctaaatgcttttactaagtcatgtggtagattacttacaaaaccaacagtatcagataataaaaattctttgttatttgcaagaactatatttctgacagaagtttcaagtgtagcaaataacatgtttttctcaaacactttcttttcttcagagtttttaaatatatctactagtttattcattattgaagatttaccagcatttgtatacccgactagagctacatttggaagatttgattttcttctcatacttctttgagtttctctttggaattttaaatcatacaactccctatttaaagatgttatcttttcttctattcttctacggtcaagttctaattttttctcaccagaacctctatttttagtaccaactccaccactttgacgtcctaaattttcatttgaacctataagtcttggtaacatatattttaaacttgctacttctacttgaagtttagcttctctagtttttgccctttgtgcaaatatatcaagtatcaatgccgttctatctataatttcacaattaagcttttcttcaagattttttagttgtgatgtagaaagttcattgtaaaatataactatctctatgttttctttctttattaagtttaatatttcctcaactttacctgtcccaatgtaaaatgctctattaacctgctttgcattttgagttatactccctacaacatcaatatcacatgctgaacataagttttcaagttcaatcattagttcattaaagtcctcagatttattatttatgtttaatcctactgttattccttttttcgtcatatccatattctccttatctgctattttttatttaatctatagcacgagattatggctctataattaaattcatcaagaattttgctttttatcttatccttaaatgacacttcttatttactattataataaccataatcgtgcattattttctcaatcttatataaaaaatcactttcttacacctcctcccaaatatattatgcagttttttcaataaaaaaactccttacaaatctaagtaatacaaaacaagctacttatatcataagaaggattaaaattctaaatatatattaaaaatacattagtttaattaacttatatgtaattatcattttatatttaaccctattcttaaatttaagtagttatttgcatgattaataaaagtaataaaaacatatacttcaatataatcatcaactattaaaattaaattctatttataataaaatttaaagaataaaattaaatatacattttgataatcacctccaacattttccttactacatattataataaaataaacactttgtaaagacataaaattatgtggctatctcaaaatatagataatcctctttttcattgttaaaatgataaaaatacactttatttcatacacaaaagagtgccttatgaattaaaaagttcattttaaggcaccctcatttattttatcttattaattacatgtctatgctaagatagttttttgttacattgcttcatcttcttcaaattgagaattgtaaagattggcatagaatccgcctttctttagaagttcctcatgatttccttgttcaactatatctccttcattcattacaagaatcatatcagcatcacgtatagttgataatctgtgggctataacaaaacttgttctaccttccataagattatccatagctttttgaatcaatacttctgttctagtatcgacagaacttgtagcttcatctaatattaaaattttaggatcagctaaaatagcacgagctatagtcaataattgtttttgaccttgagaaacattacttgcttcttcatttaatttcatcttatatccatctggtaacgtcttaataaatctatgaacatgtgcagatttagcagcctctataacttcttcatctgtagcattcaacttaccatatcttatattttccataattgaaccactaaataaccatgtatcttgaagaaccataccaaacatttctctaagctcactacgattaaaatctttaatattatgaccatcaatcagtattgaaccgctattaacatcataaaatctcattaacagtttaactattgtagttttacctgctcctgtaggtccaacaatagcaactttttgaccaggtttaacatttactgagaaatcatttattatagtcttgtttgggttatatccaaagttgacattttcaaaatcaattttaccttctaaaccatctattgaaactgcattttcaacaatttggacttcttcttcctcttctaaaaactcaaatactctttcagaagctgctgctgttgattgcaataaattggcaacctgtgcaatctgagtcattggctgtgtaaagtttcttacatattgtataaatgactgtatgtcaccaacctcaattgttttcttaattgcaagccaacctcctaagattgataccattacatatcccaagtttccaataaacatcataagtggttgcattatacctgataaaaattgagatttccacgctgaattatacaggctatcatttagtttatcaaactcttcaattacttcatcttcacgattaaatgctttcactattgtttggccactataagtttcctcaacttgaccatttacatttcctaaatattcttgttgatatctaaagtatttttgtgatttctttattattcttgaaattacaaacattgatattggtaatattaaaactgccactaatgtcataattccacttatagataacatcattatcaaaacacctatcatagttgttactgatgttataagctgtgtcatactttgatttaaactttgatttaaagtatctatatcattcgtaattctcgataatatttcaccatgcgtcttagtatcaaaatacttcattggtaatctatccaattttgctgaaatctcttttcttaaattataggatactttttgagaaattccactcattataaatccttgtataaaagagaacagtgcacttatcaaataaaggaaaagtaaaaaggttaagatttttccaattgcattaaaatctatacctacgtttcctccagaaactttactcactaacccttcaaatatctttgtagttgcctttcctaaaatttttggacctactatagaaaacgatgcactaccaatagcaaatacaattactaaaattattgatattttaaatttagataaatatgcaattagttttcgcatagtccctttaaagtcatttgctttttgtcctgcttccatagattttcccataggacctcttcccattctactcattagctagctcctcctttgaaagttgtgataaagctatttgctcataaacttcgcaattttttagaagctctttatgtgttcctattccaactatttctccctcatttaaaacaattatctgttctgcatttaagatagtactaattctttgtgcaactattagaactgtactttcagcagtttttgattttaaagccttacgaagagctgcatcagtttttaagtcaagtgctgaaaaactatcatcaaatatataaacttctggattttttgctattgctcttgcaatagaaagtctttgtttttgacctccagatacatttgttccaccttgagaaatttcagttttaaaagcttctggtttagaatctataaattctgtagcttgagctatttcagctgctgttctcatttcttcatctgttgcgtcttttctaccatattttaagttggattctatagtaccagaaaacaatactcccttttgaggtacatatccaattttttcccttaaatcatgttgagaaacattttttatattaactccaccaagtaatatttctccttcagtaacatcaaagaaacgaggaattaaatttataagagttgacttaccactaccagtacttcctataaaggcagttgtttctcctggctttgctgtaaaagatatatttgttaatataggttcttctgcgtctggatacatgaacgaaacatttttaaattcaacaagaccctttttatcttccttaaactcttgtgcctctgatttttctgggtcttttatgcttatatctgacactaatacttcatctatacgtgtagctgaaacggatgctcttggaagcataatagataccattgatatcattaagaatgacattattatttgcattgtatattgtataaatgccatcatatctccaacttgcattgctccagaatcaacactgtatgcacctctccaaactataagaactgtgataaggttcattataagcatcatagcaggcatcatacatgtcataactctatttacaaaaagatttgttttagttaaatttttatttgctttatcaaatctttcttcttcatgtttttcagtactaaaagctctgataactggaataccagtaattatttcacggcttactaagtttaacttatcaacaagcttttgaaccagtttaaacttaggcataaccactgagaataacactacaattaatgataagatagcaactactgctactgctataatccaggccattgaagtatttgtgtttaaaacctttatcactccacctatagccattataggtgcatagaatactattctaagcaacataaccatcaacatttgtatctgttgaatatcatttgtactacgagtaattaatgaagctgtagaaaattcattcatttcagtatttgaaaatgacataacttttctaaatactccacttcttaaatttctacctacacttgctgctactcttgctgctaaaaatcctactgttattgtagctaccatactaatcattgctataccaagcattttagcaccagtaaataatatataattattttgagttttttctgtatcaatacctattttctcatattctgaccttacatatgaaacagagctttgtgttatcatactctctggcatactttcaaagcctttgctcatctctttagtcaatgtatctaactgttcctttggcattgctgataacaatttaaatatatcaacatctccactttgagtagcttgtggtggaagtttactcattaactgagctttcatagcttttacctctttactatcgccctcaagccctgatactattaaaatagctttaccaaaaataacatttaaatcatctatagtgtctttgtctttagtatttaactcataaagagattcatcttttagacctgggtacttatctttatacttaacataatcctttttattcagcaaagtataattatctagtactttatccttactacttttatccataaataaagtaattttatttaattcactctctctaatcacagatggaacagagttttctactccaccttgttgtatacctacatttactatattggatgtgtattctggtaaagaaaggtcacataccgcttgaattaccaatagacagactattattactattgataatgccgatttctttaaatatttaattaatttaaacatacatttcttcccttctgtaatattaattagtctaataacattaaattgaaaaacattattttaaactttaaaaatatttttcatcttcatgcttatgacatcctgcttttaaattatctcgtacttgcattagaagtcttctaagtactattttttcttcttcactaaatcctaaaaaaaactctctttccaattccttgttaaattcttcaactttattacatatttctaaacctttgtctgtcaaaaaaatcctagatactctttggtccttttcatcttgttttctttccacaagtccagctttttccatcctctttatcataactgtagttgtagatgcttttactttccttttatctgctaattctttttgactttgcccatctttcatctttaaagaaaaaagtatttggggttgaccatgatataagcctaatttatcaaaataaaaatgagttcttataaaatatattcgcattaattgcaagaaaacatcatttaatttttcttcagaattgctattcatacttgccctccttattttttatattacttagtcggctaagcattattttactatactgcatgcattttttcaatatatttataaaaaattcatataaatttcatttattaaatatttttatatcatatagttataattttaataaataatagtaagatttttaattagtcagctacttatattttttattgtaaagcttaaaataaaccttttcatatattttcaaataaaaaagttgtcccaaaataaattttgaaacaacatcatattcaacagtatcttgattatataacattacaatactctacttatcttcatatccatttacaacaacgtctaacttcccagtttcaggtgatataattagaccatgtacaataataccatctggaattaaaggatgcccttttattaaatcaatactatcttttacagattcttctgcagaatcgaatccatgtaaccattgttttgtatcaattccagcactacgaagtgtaagtattacatcattagatattcctctatctaaaattttaccaagtaacttatctgtatcaacattacacataccacatccatgatgccctacaaccataacctcatctacatcaaattcgtaaattgcaactaaaacacttctcataatacttccaaaaggatgcattatagtagctcctgcattttttattagtttcacatctccatttttcaaattcatagccttaggcaaaagctcagttaatcttgtatccatacaagataagactactatttttttatttggatgttttgatgtcacatattgttcatattctttgttctctacaaatgatttattatattctaatatctcttcaagttttctcatatgtaatatcaccctctttaaaaatttttttattattatatcactattaaagtacaatatatacacatataatttaatttatatttattaaattattttataagattattactctactataaatcttgtatataacttgtatttataagtatttgtatatttattttttataatctaaactaatattatatattttcattatttttttaattataatttttttaaaattttattctaaatgccttacttataattaattttttatttcacctatatataattagatttaaaaatgtttaccttaccaatataatgattaaactcaaaagtcttattgaaaaattttctatttacataaattgttcaatatataaaatagaaaatttttttaattttcaaaatatattctacatatctaatatgtaattacaataaaaaatgctataattaacatattattaattcgttttattattgtagtatggctatgaaattatgaaaatatttctctaattaaaaatatgatttatccatatttgtttattgtagatacagactatacaaaaataaatagcacttatttcagtataaaaacatatatagtctatatttagactaaaaaagtataaatagtctatataaaacaacttaaactatgaatataatctaaagtggagggataataattggcaaatataggaaaaataataggagatagaataaaagtctatagaacaaaattgggatatagtcaagagtttctagcagaaaaggcaggtttacatccaacatatattggtcagattgaaagagctgagacaaatacatctatcaatattataatgaaaattgctactgctttagacataccacttgaattgttatttgcaaatattattacaacagaaggcgttgataactctgtacctttagaatgttatgaaatgattaataaattaactgaaaaagaacaaattgcaatgctagagttaataaagtgcatcattaaatacaaagaaatataagtgagggaaatagtaacaataatgaattatataggtaaaagacttaaagaagaacgaaaaaaagcaaatttaacttcaaaagaatttgcaaatatggttggagtatcgccttggtatataactcaaatcgaaagtggtaaaaagaatccaagtcttaaaacattcataaaatttgtaaatatattaaatatttctgcagatgttcttataaaagatattacttccactggaaaaacatatttagaaaatgatataaatgaagagttaaaagacttaaattcaagagaactaaatctgatatcacagattatagacatcataaaaaagaataaaatataattctttatattttatataaaaaaaaaggttatttgaaataaataacctttttttgtctttttgtgttaacattgtcttatagtgctaatgagtactattagaccatgttctatggccttattttaatataaaacgattggagataggctatgattgtgattgaaggtagtgataaatttaagattgcaaaagaatatattgatgtagaatatactctttttagcaaagtaacttttaggtatgaaaagttgaaatttaaagataatgctgaattggaaaaaattaagatgtttaaatataaaaatggctacatccctaataaattaaacctttcttttggatatggattctcttcttataaaaagcaaataattagagaaactgtagatactttaagattgacagaaattttttcaagcgagaacatagaagatattaaatttataaaagatggtacaaaaaaattagaaattagcatagagaaagttgtgaaatttaaacgtcgaaaaaaaagaaattatgtttgttgctattgccctgatatgtatagagatataaaactcgacaaagaatctatcaataagatatacaacagaaaaataaaaatagaaagagaagttaatatttttgaagatgaggatgttataataaacaagaaagtattgaagtttccaaagtcttggacaaagaatatgcaaaaatattggttaagtgaaaataagtatcccatacattctactgtaattgatgatgatagatataaatgttgtaatgtacaatatacaaaaaatagagtgataatattatattacatatataaccattaatatacataattacaaaaaaataatgacaaatatacataatacaaatatatcttctactttagataaaacagttattatgaaaacttactatctataaataatagaaatgctagtataccatctataatctaatgtctagtaggttttaatggcatattttaaatatgccatagttgatttataagattttctatatcactttcaaaatacacactaaatagttgcttttcagatataattgcccaatttaaattttactatctgaaaagttttttatatttaatttatatcttcaaaaataccgtctaatatttctatataattaatttaattaatactcttatgtaatagattaagtactgaatttaactctttaaatgatatttgccctggtgctgaaacactttttgcagctccaaaagtcaatgcagaaccaaatatttcaccacacaatctacttataacacccattcctgacattgacattgttattattggtctatctgcataaattttaaacatttcatttgtagcttcaagtagcactaacacatctctttcattttgcggcataacagctactttgggtaaatctgcgcccaattcctgcattctacataaacgagatacaatctcttctttttttggagttttattaaaatcatgattagatataattactttcacttcttttttatgagcaaaattaactacttcatctatgacctcatctcccataaataactctacatctattaaatctactaaacctgtattagaaatttctttattcaaagtagtataataatctcttgatattaatttttctcccccttctactacacttctaaatgtgaataataaagggatatcatgtatataacttcttaattcatagagaacttccttaacttctttaatattttctacattctcaaaaaaatcaactcgccactctataatatccaaacatgcatcttttaactctttagcctcttttataatatcttttttatttttcccaataattggtacacaaattttaggtctaccttctccaatagtaatattttttacttgaacttttcttttcatattctcctccataatcagaaattctataggactttaaattctattttctgcataatttaattatacattaaaaatactatacattataaaaatactaatttaaaaataatttttattctaattcttaaaacaatcccacatattttagaaaaggtactctataatatacaaacacttcttttttacctaaatttattttaacattctataattttcacaatattctttaaattttactcatataaacaatattattctggatgctaatagaattaatctataaatcatagtataattatgcagaaataactcgaatttcactacttataaagagattgaatattaatgaatctaaatcatttgcattacttcagagttttgactaaagttgaacaccatacaaaagtagctactcaattgtttataccccaaccaagcttaagtaatgttatatagattcttgaaaaagaatttggtatctttttatttgaaaaacaaggtagaaatgtttccctcactaaatacggaagtttttttctaacctatgttgataaagcattaggttaattagaaaaagtttacatataaaatatattaaattgttgcaagttttattgttttgatatacaatcaactaaacatataatctttataaaatactatacagttaaaagtctgttttaaaaaaaaatgtataaattataaatcaaaatatagatactatcaaggagtgattctgtgaagagatgtattgtagtagtggaatagtcaaaaacataatatatattaaaggagagatttaaatatgactattccaaattcaaataaggtatatccaagaagtaatgattatcaaactgtatatcttaaaaatgtaataacaagggaaaatatagaagttggagattacacaatatataatgacttttataatgacccaagagattttgagaaaaacaatgtattatatcattaccctataaacaatgataaattaataattggtaagttttgctcaatagcatgtaatgcaaaatttctaatgactagtggaaatcactcaatgaaatcaaaatccacatatacttttcccatcttttatgaagaatggaaactcgatatcaaccatataacggacgcttgggacaataagggtaacattataattggaaatgatgtgtggataggttatgattctataattatgtcaggtgtaaatattggtgatggtgcaattattggaacaagagcagtagttactaatgacgtctcaccgtattctattgttggaggagtacctgcaaaaattataaaaaagagatttaataatgatacaatttcaaaattattagaaattaaatggtgggattggccatataaaaaaattcaatcaaacattaagcatattcaatcaggaaatattgataaattagtttaatattttataatttatttatattaaactttactttaataatccttttataagagctttttcaaaatttgtatattattttaatatatataaatttaatacaacattaaataaaataaaaagtaaagttacttaataaaaagttactttactttttattatttaaattcctgtttttattataataggtaaaattctattaaactagttcacattttcattattattgatatattatatatgaatataccattttgttttttaataaaaaaatcatgctacatcagtagtaagcaactattaatgtagcatgattttttgtatctaaataatcttagtatttacctatcaatatagattgatatatcaaaaactatagtcttctatattcttctctttttagcttttggttacttagatagtaatcaatttcatcaattagacgttgtttatcatcaggtaatacaccttttaaattagcataatttgatgcatgattacttctaaatacaattttttcattagcatctatattctttatcatctctttaatttcttgtaacacagccttatcctctagtattgtaaactctcctgccttaagtaaatcgtaaagttcagtattaggttctaccattaaactaagtacacccacataatctggtgaaattgctcctaacatttttcctgtatcaactgcatgctgatgtgtttttttagttcctccaagacctgctattacagtggctgataatttaatcccactttttttaacttttctaccaacttttattaattgttcactactaaaacctttcttaatatcttctaatacttcattgcttccactttcaagccctagataaatcattttaacaccaagttttcttaattctttaagttcatcatcagattttttctctatagatttaggagagccgtacatagtaattctttcacactctggaaaaacttcttttatatataaaataatatctcttaatttctccattggtattatcaatgcatctccatctgctaagaatattctttctacatgcttataatatcttctaaatatatcaatttcattttttattacttctagtggctttattttaaattttttagatttgtacatactacaaaacgtacatttgttatgagaacatcctagtgtgacttgtattataagactataagcctcacttggtggtctgtaaagtggcatatcgtattccatattaaaatcccccttgtaataaaatattcattctattatattattaatatttactttaaataataacttataaaattatattttttaaattttagtttaagatatattctttaaaaatttaatgatactattggcagtaatattaagttgtttttcttgacttataatagcatcattatctcccttttgttttccatagtctccaaattgtgcatgatttcctccttcaatctcaacataagttgtatcatcaggaagtttttgttttgattctacaagacttttaaaattgactactccatctttgctcccccatatagatataactttttttcctaattctttcaactcatcacccattggataagaagctaaaaatacaacgccttcaattaatttattatcacgtgcaaaatttgatgctgcaactcctcctaatgaatgacctcctattacccaatgttctatgttgttgtaagaatccataactttctgtgccttattagttccaagtatagctagattaagtggcatctttacgattacaacctcatatccactttctgctatttttcttgcaagtggagcataagattctatttctactttagctcctggatacaaaattaaacctttagaaacttttcttccttttggtgtaaatgaaatgttttcatttacagttacttcaactttactattgctgactagagcttcttttgccagcttttgaggttcatatgttttatttatccatatgaaaaagccaagcaaaatcaatacaaatagtatacctattcccttaaatatcttattctttatgttaaattttctattattatttttatcatctttgttctcaacctcatcataaagtaaaggtctctcaagttccatagttatactaaatgtatcatatttcttattacgctttacctttacatctttactcataaatctaacccccataatatttgaatactattatagtttatcctaagtaaattgttttttcaaccaatgaaaaaaatcaatattttaactattttcatataaaattcataaatatatgttttttgttttttatatattattttcttttagtattttataaaacaaatagccatatactttattttaaatatatggctattctataatttaatatctaagctgcttcttttattgaaactttagttatattacttattctatacatttctttgacaccatttagagtttgcagtaagtttagacatattatcttgtcacctagacttttagtatttacaatactctctaaaattacacttcttccttcatcatacttatctacattgtaatttgaaatataattagtatctctcaatattttttcaacatcttcatcttttattttatttttattaacatttatatatagattatacatattacttattagtaatttctgattttctaaaaaatcctcttgatgtttatctttatatatagcatttatcaacataagtctatcttcaataagtgatggtatcaataataaattttttatatagtaaacatcagctacattttctatagacttattgacttcatcaattatatttttaactattcctttatacatttctataacatgttgatagcctgttttagcatcatatggtaatataaacttatttactattaatgcaataattgctcctaatgctacatatgaaatcctgcttatggttaaaacatttgggtctcccataactactgctgaaccaagagctgaaacagttacacataccattaattttctataatcaactacataagagtttatataccctgctaaaagaactattaacgaccttaatgtactatcttttattattgaaaataatacaataaatattacagctcctataaatgtaccttctattctttttctagacctttgtatacaattttctgcgtaaggttgtgttaatgaaaagacagttaacattatccatcttccatctcttaaatggaaataatccataataaaacccgctacagctgtagctaaagcaatctttactgcataagaaaatcttatagaatttaaattaaagtttttcttatatattgatagtcgtttaaattcatgaggtatctttgattttctttcagctttcttttcgtctcttgattttacttttttataatctactaaaaactcatataaattttctaaaacactataaatttcttttaaatttatatttttagtatcctgagcaataacataatctctaaatcctaatatctctttatcagttatggtatctttattttctaaacacatcttaatatagtttatttctttcgttgctacaactagaacatctgatttactatttatgctactttcttctaaaatattttttatatcttcatcttcaaattctttactatcctttttgtatctttccatgattaaacttattctttctaatgaaaataaaatattcattatgtctatacctctaatactgatataaaagtcatcttttctattatcaaaaataaccattttcaaatttttagatatagaatttattctataattacagctatctatttttctcatactagatttaattatagaactatcatcattaatagtattttttaaaagactaattttttctaataattcatcacatatagatatcagttctttatctccgacatttttcatcctatttctattcataacaaattgagcaatcattattataactgctccaacagctaaagccgacaatctcataggaaattcactttttcctacaggtatacttaccataaatatatacattagaccaaaaggtacatatactgctctctttaagtcataactaaatacataccctattataaataatgctataaaatttaataaaactcctaaatacatattttgtactgcaaaaaatgatagtattcctaagattatatttattgctaaatacttcagtaaatttttaattggagaaatagttaaatctctttccaagagtgttagcatagctgttactatacctacacctataagtgtatttttacttccaaataaatatataaatatagaaataaatgctattataaaaataaacaactttgtttttgatattactagtttctttgtcatcatatcccccctaaaaatttcaacaagaccaattttatcatatttgttatcttattcaaaatgcgcttttttacggtaggactttaactttttttatatttagaactatataattcatatataaacgtattttttttatatataaccgatatattttcgtatgctcccatattttttttgtttcaaatattttttcaaaaatataaaaataactctctcaataatactaaaaatgtatttatcaagagagttataatttatacaataaatttaattaagcttttctttacctaatatataagttccaagacccataaataaagctcctccaacaatatttccaagtgttacagctactaaattataaatagctcctccaatagtaactgtacttattgttggtgaaaataatgaaacactataaattgtcatatttgctacactatgctcaaaacctgatgttataaaagcaaataaacataagaatatcataattatttttgcagtatcactattagttctaaacgaacacaacactgatacacatactagaatattacataaaatccctctaaagaaaagagctgtaaatggcatggatgctttactagctgctgtatttgcaaaaaattcagctacaggtcctttgtctactagaccagttcctacaaatataagacctaaaaccaaagctccgattaaattacctacccaactgtatgcccatattttagaagtatcttttatacttacacctttatttaacataccagcagacataaccatattgtttccagtaaataactctgttcccgtcattataaccaaacttagtgctattgcaaatgataaccccattactatcttagtcataggtgaacctgcatcagtcaaaagtcctcctatagtaaatatcaaaagtatacctatacctacataaagtcctgcaaacgcagaagataccaaatattttactttacttgtgtttaataaatttatcttatttatagctgcattagttaatttatccaaagtttctttatgcataattccctcttccttctattaaattttaatttattcaaatatatgttttactcaatttatagatatttaattccactccagtatatgttttcgtacattttagttatttctggaagctctacaccttcaagtgcccattttttaaattccataaatcctgttctatcaattatatatcctatatgttcttttcctcctggtgcatctttatctatatacttttctacatatctataagtattaagtattatctttattatgctgtcctcatctacccataaaagaaaatcttctgctagtctagggtttttctttcctgttctacccattatagctaatctatagtattttttctcatctctagtccatgcatttgttgggcaatttagtacacactctccacatcctatacacttatctttatctcttaccaccttattattttctgtttttaatgctccaacagatattttagaacatttttttacacatgctccacaatttacacatctatctttttcatatattggtaaagccataccaataattccaaagtcattcattctagcttttatacaatcatttggacaaccagttaaagccactttaaaatgtaaatcatttggaaatatagctttttctattcttttagcaaattcagttgtattatattgagcctttggacagactttatttcctatacaagctgctatatttcttgtacctgctgctggataacctgcgtttttctcactttgatttatattcattttttcaataacaggttgtataattttatttatttcttccatatcttccatatttattcctaatatttcaaacccctgtcttgtagttatgtgcacctgtccatttccgtactcacttgcaattttagaaactacagctaaactctcagggtcaataagaccaccaggtactctaactcttaaagaagtctcatattttgtttttgtaattctataagcatttttcattacttttttggtatttaaatctcttatcacaaacttcgccccctaatcaataagatttttagcatatgaataatcaaatactggtccatctaaacatatgtaagtatcatccattttacaatgtccacatttacctattccacaacacatttttctttcataagaaacccaaatgttcttttcatctaaatctctttttaaaaattcttctactgtaaatttcatcatcattggaggtccaactacaactatagaagtattgtttatatctttcatatccaattctggtatgtattttgttactaatcctacattaccactatatccttcctctgctccatctacagtaactaaaatatcaagttttttactccatctctttaaatcatctgcaaataaaatatcttttggtgatttaaatcctactattaatttaaacttttcgcatttttctttattattataaaaatattcaactattcctcttacaggggctaatgcacttcctcctgccactactacaatttctcttccttcataaagggatacatcaaatccatttccataaggacctcttataaaaaaagaatctccttctttataattaaacaactcgctagttacttttcctacatttcttattgtaaagtcaatataatcctctccatatcctgatactgatattggactttcaccgtatttaggtatagatatctcataaaactttccaggcaatacaccttttgtattgcagtttactctaaaagtccattctttatcagtatgtttaactatatctagtatttttgcacttactggtatatatgggttcatttatacttcctccttactaattactaaatcatttattttttctatacactttgaaaatgatatgtattgcggacaggcatcatcacatcttccacaaccaacacacatatgatatccgaatctttttttaaaatcatgtattttatgcatagttttaaatctcattctttcaccttgtttttttctaaaagaatttccacctgctatatctgtatatccatctacttgacaagaagcccaaacccttcttctctcacctacattttcgttttccttatagaaaatatcctgcattgtaaaacatgaacatgttggacatacaaaattacatctaccacatcctatacatcttgtatcatattcatcccatattgaatttcctataatttcatttgaatcaatattctctggcacatctacagatattaaattatcagttacataatcaacattaaattcagttgcttctccattaaatacttcaaattcactatcctttatatctaagtacagtgtatctccttctatatttaatccaattgaataattatcagttttgttagaatccatgctcacacaaaaacagtttctaaaactttccttacaccctacaagtgcaaactttactttatctctgatatttttataaaaataatctttttcttcaccattatttagatatatttcatcaagtctttttataccatttatgtcacaagctcttaagaaaattaaaattttcttgttgtctaaatcgctttccttaaactctttttcagtaaaataaaacaatacttgatttatgggaagtacaacttcttttggtgaaaagtttgctttcttagcaaattccatttcttcaaaagcgtttacctccttgtatcttataacatcagtatctgaaaaagtacctttaaatgggattaaaactggtgcaaatatcttgtagtctttttttagataattcagaccttcattgaacttagatgaatctaattttagtttcatttttatcacctttcttatattttagttttacttacttgctatcttgtttaaatcttaacactttattttctatgcttctgtgataattatcacagtttcaaaaataataaaaaaatattaatagagtttactaatctctgttaatatttttttattatctatattattcgatttcaaatctaatcacttagatacaatcattaaatacaataaaactattatctactcaattttttgaataataaagaatcttatttgcttttttatacaattcaatagggtaaaataaaaattaataaattagacaataaaaaagaatctataaatagattctcttaataatatttttatttaattaaaattctaataatacttttacttaatcataattaattatttttgaaataccttgataattcagtttctttaacataaaaacctttattatcaatcttaataagttcttctttttgcaatacctttatcattctggaaacagtctcccttttacagccaagcatatcagctaaatatgtaactgtaatatttacatttagtaaagtccattctccacagcaaactccaaattctctacttaacctatataattttgctgcaagttttttatctacttttatggatatagaatttttcaactgtctatataaacgtcttattcttctttccatataagaaataatatcctttgtaagttgaaaatcattttgcataatttctaaaaattcttcaatactataataagctacaattgaattttcaaatgcttcacagccaacagtggagtttttagaagagtcaaatgtaatatcatttatgacttccccactatttaatatgaaaattacttttctctctccattttcacttatcttaaaaatagatacctttccttctaaaagtatataaacactgtctaagctatctttttcataaaataaaatttcttttttttgtaatctttttagtttagctttttctttaagttgattcttcgttttagtacttaaattattaaaaattattactttatcaatattataatcttttaatttagacatgtaatatctctccattcctaaatttttaagagagctctataaaacattacaaatttcttattttattcatttttaaacaattttatagcatttgtagttttaattttcctttcaatagcttcattagaaagttcttttactacctgtgtatatactaaatcaataatgaaaaattgtgctaatttagaagatattgaaccagtttccagtactgtttctcctgatacataagataagtgtacatctgaaatatcctttaattcagaatttttattttcagtaattgatataattttagcattattggctcttgcaagctttacagtttttataatctcttctgtttcaccagaatgtgaaattgcaattattaaatctccttcttccattatggaagacatcattatcatcgtatgactgctatcaaaacttacacaattaaggcctattctcataaatttatagtttgaatcctgtgctattataccagaatatccaatgcctatgaagtaaactttctttgcatttattataagccttgcacagtcatgtacatccttactattgattatctctactgtgttctctaaagtggttacatttgaacttaaaagtttttttgctgtatccaaagctggctcatcattttgtatatttttatttataatattttttttattgatagttgatatttcttgtgctaaagtaactttaaaatcctgtaatccattaaaattcattttttttacaaacctagttatagttgcttcaccaatattgctctctttagctatttgtgatattggtttataaaatacatcatctatattttcttttatataagctattaataatttatctgattttgtgactttaaaagttggtgattccaattgttctaaaatactcattaaaaacccttctattctttatattttgtttaaaaaattatataatgctccaagcattcctgcatcattttgtctctttgcaaattctatattagtgtttttgtaaactctctctataagaacctcctttaatgctttgtctatttttggttttaggaacttttcttgtgccataatcccaccacctaaaattaccacttctggatttattacataacatatatttgcgattccaactgctaatgattttatcatattatcgagttcttttaaacaatcttcatcattattctttgctaaatcaaaaattatttttccatttaagtccttttcattcaaattttttatttttgctacttttttaattagactgctagtagatgccaattcttgaaaagaacttccatttatattcatatatcctacttcaccagcgctattactaaacccatttatcagtttattgtttattataatacatccaccaattccagtacctattgttaaacatatagaagatgttgcacctctacctgcgccaagccacacttcaccaagtccagcacaattaacatcattttcaacttcacattttatattaaactctttttctacttctttttttaattgcatacccttataatttggaattaattcttctaatgcaaatagtattttaccttcaactgggtcaaccatacctgcagttgatatacatataccacttatttcattttcctctatatatttttttactatatcttttattttggctaatattccttctccacctttttcctttgcttcagtatcaagacttgatttatcaattataaatccatcttctctaataaaaccatattttattgaagtacctccaacatctatacaaacgtaatttttcataacatatctccatacaaattatttttataaattaacaactctatttaaaattttatattacacaaatcttttacttatcttttccaattcacagatatatttccttgcttctgataagtctatagtatcacttaatacacttttttctttggttatatgatacttataaatatttttacataagtcctctcctaacatattaagaccttcttgagtgtaatgaacatcatcaatagttaatcctctgtcatgaaattgcatagcaattttacttcctacacacagtatatcacattcattacaagcagattcttgagctgctgcaattcgtcttgttctaataaaatattcatcttctccaagccaataaccagttaaacttacaaacattttatcaatcatacattcttctttaagcctatacgcaattttttttagactttctttatagtacaatgcatcactaccatattttgcatcactttcaccttgaatccaaataacgtatttattttctatattataatgtttacttaaggtagtacagcctgtattaaatttttctatagtgtcatttagaaaccagttattatcatgattccagttttttattcttgaaccatcttttgcattgtgaataaaacaaactttatttccagtaagcttattccattcatttgaaaatgcaggtgctatagtaccatcaccttctgaagtctctagctcacatctcatatttataatttcatcagtactcaaatattcaaaacaattttcatttggaatgatgctctcttttggatttcccaatcctctagcattgctttgtcctattaataagaatacatctatattttccataagttaactcctttacaaaattttaagcttttaattattttcaattttctcataaaaaactaaggctgaaaatagtaatctaactaaaatttacgaagtctcactaatcgctgaaagttaaatcactattttcagccctagtggttatataaattatcattatctaaccaaaaccttaaaaatagcttttttgatattttctttttctaaaacttttattcctgtcatatgagcatcttctggataacaaactaaaaaatcaccttttctaagttccatgtatccattatttttaccatcaagaggcaagaaatcgcccttttcttcatatattttttgttctaaattttctataaaatttatatctattcgttcacatccatcaagcatcaaatgaacatctatatacttcttatgagcttcccagaatctatcttctttttcacaagttttatactctacaatattcacaaaaatatcatcaccatctattgtataagtacctttttcataatctattaatgaattatctttagcatattcaaaacatctaagtaaatcttcatgcaatgttgaatatgtcttactatgatttatatttccaaatatcataagcactatctccctatataattataaagtctatttttatacttttatatacaaagtatattatacaatcttatagagtaactaaattatttatctaatcactctataagacaatttatcatttaaatattatttttcataataaacagtagtctcagcttttggtaaagatacttttgctttaactttagcttctattgcactaactattgtacctaccactacagaagtcgtgattgttattagagaatatgcccaagaagttacttctggcatacggtattttaaataaacaactaaaattgctgatactatgaatccaacatatgctcccattttagtcgcttttttacaaaatgcaccaagtacaaatattcctgctaaaacacctagtactagccccataaaactattaaaccattcatatgctgactttatttctccatttgctaatactattgcaacagctatagaaagtatacctacacctaatgatatatattgtgctatcttagtttgcttttccatacttatatcttttgttatgatagtttgtatatctaaagtccaacttgtagcaactgaattaagccctgtcgataaagttgattgagaagctgcatatatcgctgcaagtagtattcctgttatacccactggtaattcataagctatatatgatgcaaatacttggtcttgttgaactgtttgagctaaatctgggttttgagtatagtatataaataaacaagttccaattagataaaatactgttgcaagtcccattgataaaacaccatttccatatgtcattttattaagttgctttatatcagttgttgtagtaaatctttgaactatatcttgactcgatacatatgatgaaaaagtattaagaccagctccaataaatattataaatgcacttgtagatagtatatttttatcaaacataacttcattacttgctaagaacttgtgtccagttgtaagagtatccattactgttccaaaaccaccatttatacttgctattaaatagaacaatgtccctgtaacacctactattaataccataccttgtataaaatctgtccacaagacagcctttaatccacctgtatatgaataaattattgctattacacccataactactatcaatacatttacaggtattcctgtaagaccagctagaaccactgatggaagatacattatgatagacatacgtcctatttgatatattataaacatcaaagctccaagtactctaagacctttactttcgtatctcatttctaagtattcatatgctgtatctatttctaacctactatacagaggtaagaaaaattttattgtcaaaggtattgctataaacatacctaattgtgcaaaccacaaaatccaagtaccaccataagaatttcctgctaatgataaaaatgatattggacttaataatgtggcaaatattgatactgatgtaacccaccacggaatagttccatcacctttgaagaactcttttcccttcatttccttttttgaaaataacaatcctgcaaataaaactgccaataagtaaaccactagtattgcaaaatctatccaagtaaatcctaccatttgactaatcctcccatactaaaagtattttattaaaaatactttctgtatatttcttttgctcttgatttcatttcatcagttgcttctttcataggttgtctacagtatccagcctcaacaccttgttcttcaagtagtaatttaattgtttgatataagccatttcctaatatatctgttattaaatcattagtcacatgttgtacttcaagtgcttctgatattttttcattcttagttaattcgaatatttgtctagctctgacaccgtttacattgaatgtagaaccaattgccccatctacacctaaaactgtagctggtaacatcatttcatcaaatcctgcaaatattaatttatttgggaatgtttttctcattctctctaataagtagaaatctgctgctgtaaacttaacacctattattttttcattttcaaataattctccaaactggtctaaactcatatcaacaccagttaaaaatggtatagagtatattattaatctattatctacagaatttattattgtattataatagtgttttatttcttcaaaatcaaatttatagtaaaaaggtgtaacagcacttattgcatcatatcctaaatcagttgtaaatttagcaagttctacagcttcttttaaattaactgaaccaacttgagctattaattttatttcttctttcacttcatctttagctatttcaaatattcttttcttttcatcagttgaaagcatgaagttttcccctgtacttcctcctacataaagaccatctactttacaaacatctatattgtgtctaattatttgtcttaaccctttttcatttatattcccttccttatcaaatgaaactaataatgctgaataaattcccttcatatctgttgttctcatatctttacctccaattttaattttcaagtatagttaaatataataattttttaatttataaattaatttttaattaatttcaattgctttaacaaatttttctgttattaattgtggtcttgttattgctgaacctactactgatgaatgaacacccaactcaaagaccttttttaaatcttgaggagtatttacctttccttcagctattacaggtatttctaaatctttaactaatctttccattaatacaaaatctggaccttctaatgttttagtatatggagtatatccagatagtgtagttgaaacgcaatctacaccgtactcttgtgctttgatagcctcatcataatttgaaatgtctgccattactagaacaccgttttcttttatatactttataagttcttttaagtcttcattatttggtctaactctattggtagcatctaatgctatcatttcacaccctgttgttaaaagttcatcaacttcttttttagttggcgttatatatatatctgaatcttcatagtttctctttataatacctataacaggaagtccagtaactttttttatttcaataatatcttcaactccttgagctctaattccaacagctccaccttccatagcagccttagccattctccccattataaaaggactatgaagaggttcattttctaaagcttggcatgatactattaatcttccctttaccttatctagcattttttaaattacctcgtttctgaaatttattttcttgatttatgtattaataataacatgaaaactttttctttgcaatattttttcatatttttttctcgcatctatatttttactgatttattttatatattagcttgttttttacatttaaaagaaattttatttcatttttttggtgtttattttcattttatataactactgttataagtccatttaaataatttcaataaaaaaacccatgtatactatacataggtttcccaatattattctaaatccattataatttttcttccacagcatggacaaaattcagcctctgtatctatctcactttcacaataaccacaaattataaaatcatcacattcattttccaattcaaattttttaccacattcagcacaatatttatcatttacatttccaacataaccacactcacaagttacattactttctgccatttccatttcattaatttccatatttttttcataaattaacttatcaagttctagtaactcatcacagaatttatcaaaactattatcattaatagaatcttctctaattttttgatatgtcagtattcccatttccaagaatatctttgctttcttttcttgaatatcatcaatctctctatttaattttgatttttctttatataattcaactttaaattttccactaccaaactttttcttaaccttagaaaatttatcatctactttattattagtatttccttccacagaaattccctccaatcatatttaatcagctgaatttagcttatatcctattaaagatatcacaaaactatatacaaatgaaattacaatagcttgtaagactttaaattgcattattaaagttgttccataattagttgtattaaagaaattaatattactatctagtataaatgtactaaataaagccaatattcccatcaaaaatgcataatatatactaaatactattataggtcttatactatctgtattatacttaaatcttagcttgtatccatttaataataatattaacatagacaatgctcccattgcataaaacattaatttagtatctccaaataaagatgaagaacttaaagtaaacattgatactgttgagtttattatggttactgaaattccatttgcaaaagcccacatataactagctatttgtgggagtatagtaaataaatttaatccatttgaataactactcatatctagttcatttaagtaactactatcagatatagttagtaccaatagtattactaatactaaaacataacctaatatgaatgttcttatagaatttgaaaaaagagataaatacatattttccttttcataactttttttataagtagttatgtatgtacatataaaccctaatacaaatccatttaaaagaacactaaaaaattcataactatattctaatgcatatccatattctaacatactatgtgaactagtttttacattagtaaaaatagataaaatagctaaaactaatccataaaaaattccaactcctagagaatttgctaatacagtttttgaatctctacatctttttctcataaaaattaggtttgatattaataataccaaaatagggattataagtaatatcaacaaacctatattggcatttataaacccagaacccatcatggtagacatagatacactaatttgacccaagttgagagctaggattatatgtgctggatttattaaataactaatatcattaaattgaatagttataatagctttaaatatcaatgcaataataaacaatataaatatggttgtaaatgttgttaaaaatacacctcttttatttgcatgatatgaaagctcttttattttagatttcaagtctagttttgtttcaagtggtcttaatgatgctatttcataaagttcatttccacaaaatttacagtaattatccttagtattattttctttattgcaactagaacaaattttttcttctttacttttaagagtgatatggctattttttatttttctagttggttcacctgtctttttggaataattattatgtgaataattcatattatttattttcttttcacccattttttccctccaagttttactattgtaaattatcaaatataactatatcatataaaacttaattataccttaattggatatatttatctattttatttgtttattgctgttgttttttaacaggtcttgatatttaaatagtttgttaatgcgaactttattatttatattttattatgcttaatttaaatttattctattctttattttcagcagcaaactatctgtaaatcttaattatagtaaagtattaattaataaagttactcaacattagctaataaattttatctatcacaattttagattgttacacacaatatattttgatataattaaatcataaacgaagtattccaaatatctaatgatagaaaggaatacttatttttatgctttatttttaatggaggcttatatgaacttagaaaaaataaaaaaattttttggatttcctctagacaaaaaacacaaagaaaatgttgaaaaagaactctgcaattatctttatcatacgggtaaaatcatttgcataataatagtaatatctcaaataattatgatgatatcaatctcagctagagaaggaggcccttttgccacaccaagacgccaatggtatttttatatgtatgtaacactattttgtgtatcttctgtctttatgtttgtattttcttatctttggaataaaaaaaaggattgttgtacgttttatataaatttatggataatttatgtgacttttttctgcctatggggttgtgtaattactctacttgaccagttaggtggaaatgacctaagtgtatttagttatattatgttagcagctgcagctttctcagtattaaaatttggagaatcagtaatagtttttggaggatgctttttgtttcttaatttattcttacctgggattcaaactataccaggcaatgagtttagtaatattgtcaacacattttttataacatcccttgccatttttgtttctacaatgctatatagaaatcgtgtatttacttactatgataaacttttaattagtcaacaatatgaagaaatatctcatataaataatttacttaacgacaaagttatgacagacgaccttactaaaatgaacaaccgtagataccttgaagatattctacaaaaaaaattaatcagccatgcaaatcaagaacctataactggaatgatgatagatatagattatttcaaacaatttaatgataattatggacatcaaaagggagactattgtctacaaaatattgccaaagtaattttagattttacaagttctgaaaatgaacatgctatacgatatggtggtgaggaattttttatatgtatttttaactgtgatgagacagatgctaaacttaaatcagaatgtttacgaaaaattatagagtcctgcaattttgagcgtgatgatgttcctttaaaatgtgtaactgttagtattggagtttatacaaagaaaattgaaaaggcaataacattaaatgagtttataagtaattgtgataaggctctatatactgcaaaagaacagggacgtaattgtgttgcattttattaaaaagttacatactattatataaacctataagtattatatcgcaaaataaaagtaatcaaattatatatttatagtacaataaaaataacttgcatatctctaaaatagataaatatgcaagtcattttagtgtttatacttaaagttatataagttttattatatataattattaaaattcagcatttttaggagttcttgggaaaggtataacgtctcttatgttagacatacctgtcatatacataattattctttcaaatccaagaccaaatccagagtgagtagcagtaccaaactttctaagttctaaataccaccaataatcttcttctcttaatcccatttcattaattctatctaacaatacatcttctctttcttctctttgagaacctcctacgatttctccaactccaggaactaataaatccattgctctaacagttttaccgtcttcattcattctcatatagaaagcttttatatcttttggataatctgtaacaaacactggacaattatatatttgctccgttatatatctttcatgctcagtttgaaggtcacatccccactcaacaggatactcaaattcatgaccagattcaattaataattccactgctttagtatacgttattctaataaactcagagtttactatcttatttaatctttctaacaatcctttatctataaaactattaaaaaattccatttcttcaggagcattttctaatacatagcttataacatattttatcatatcttctgcaagttccatgttatcttcaaggtctgcaaaaactatttctggctctatcatccaaaattctgaagcatgtcttcctgtataagagttttcagctctaaatgtaggtccaaaagtataaacgtttctaaaagaaagtgccattatctcggcatttagttgaccactaactgttaaattagcctcttttccaaagaaatcttgagtatagtctattttaccatcttcagtttttggaatatcatttaaatccatagttgttattctaaacatttctcctgcaccttcacagtcactacccgttatgattggagaatgtgcatatacaaagtttctttcttggaagaatttgtgtattgcataggcagctattgatcttactctaaatacagctgaaaaagtattacttcttggtcttaaatgtgctatcgttcttaaatattcaagcgtatgtctcttcttttgtagtggatacgaactatctgattccccttctacaactatgctttttgcatgtatttcgactggttgtttagccccttctgtagatactaactctccctctacaagtatagatgagcttattgctaattttcctacctctttaaaattttctactttctcatcaaatactatctgcatatttttaaagaagcttccatcatttagctctataaatccaaaatttttagatactctagatgttcttatccatccagctacttttacagtcttccctatgtactgttctttttctctgtacaattcttttactgttataaattccttttgcattttaaatcctcctagtataattgttattaatttcttttaaatataatttcaataaaaaaagcccttcatccctatataaagggacgaaagactattactctcgcggtaccaccctagttgtcataatgacctcttagttaagcaatgcttaaagcctataacggtgccttccgtctaagtctacttactaaataagctttcgattagaaactccaagatgttcttcaatataaacctcgtattgagctttcaccatcctcaactcgctagaactacattttatatctactcttctcttcacagtatttatcttttattatttctactaattaacaaaattataccaatttataaatttttagtcaataaatttatataattgatactgattgttatttaaaatataataattctaccttgcataatgataataaatacttatcttcattacttctttattacttaaatttccaaaattttataatttacttccattgtcaacccagtcttttgcttcttcgacacccttaattgaaggtattgaaactttactatgaggttttaatttttcaacatcagcccatgctgctgtcgactcatttccaactaaaagtgaacttttaagtcttttattatctttaccttttaatgctcttgcctttttactttccaaaactatcacctctattatttattttgtaatagttttagcaattttacaaataaaattcataagtctaaattataatgatttttaaattaacatcatatcttttcaatacttaatttatacctatttatatacaaaatatttactttgtgtattcaaaatataaaactgtttttttaattttcatatttattttttatgccatttttctactctatctaaagtatttgatacaattaaattactaatcaattataattttacataggttcttatctatagagtatttgctatctgttgaatcgtattttttaaatttaaaatcccatatccctgcgatacatttggatatgtatatatctcaagttttgtagcacccaatattaaatatgtttttaaaacttgtgtaaacaatgataatctcggtacattatcctgtttttctaagtattccatcaataaggctaaaacacctgtgactatagaactgctcactcctgttcctgttcctgtattatatgttccatttttatatgtggatattatatctacacctgaagctactatatctggcttaattcctcttcctctaattggtcctttcgaagaaccaatccacatactatcagtcttattattaaatgtaccaactgtaattacatcatcactagcagcatacatagttatagtagctactgaatcagggtctaaaaaccttgtgtctggagctatcaaatttttatttggtaagtatatgtcatattctccacttattataagttctgaagtcaatcttaaaatccatactccaggttttatatctcttaatcttatctccaaattttcttttccagaggtaatatatggataaataaatctcattgcataagtagtattttctaagttaaattttcctctatatatataaaagtctggagaataccttatatcatgactaacttcacctgaaggagatattatctgtgctcccactttatctggaccattcgtatttagtgttatatcaagagcatagtcatctccatcttgtattattacatcttgaacttctcccacactgctaaatctgccagaataatgaatatctgtattcccttgatttcctgcaccactcactactaccacaccagcactactcaatatattaaaagtatctaatattgaagtagttgctacagcacttgacttaactccaatagtcaaatttattattagtggtttattttctgttcttgctatattagtaacatacgttatagctgctaaaaaatctgaaacactataatttatccttccagcataataagtatctgtatatgattttaatttaactactattaagtctgattctgtagtaatacctctatactgcgaatttatccttccatttccagctaatataccagaaactaaagttccagtacctatattatcttgactcaaacttccatcatttctatttatggctatatttaactgacttcttgtaaattcacttccaaaaataaaaccttctggaggtggatttgtatttgcttcttggtcccataaatatagaactttactagttccatcatcatttataaaatcaggatgcaaataatctataccagaatctataactgctaataaaattcctcttcctgttatatcattatatggattttcataaatataatcagtttcagctgctgttgtaatggtttctccattatttacattattagttatttcaattagactgctcattggttcagattcttcccaccaagcaacttgtattatattatttaaaatagtttcatcaaaatctacaggtacatatattactgcaagctgactatttaaaaccatatacctatttattccattttcttgtagggcagattctatatcaccttgataaattatacaataagatttttccataaatccctcctatcttaaaacatcaaacattcctctaacatccaaaagcccatatccagaatttgtatttggatatactgtgtttgaatcttttctagcaccagcttgcataaaagtttttattttttgcacatatgcttggtttggatatctaccatcaacaaaagtatattggaaatacattgcagcagcaccagctgcatgtgcacttgctgctgctgtaccagttatagttgcatacgtgttcccaggataagcagctattatattgacacctggtgctactatatctggttttaacctgtcttcaatagttggtcctcttgatgaactttgccataaactaccattaatagtattgtaggctcctacagttattaaatcatcttgaatagcaggataatttatagtgtaaaaagggtctacctctctaaatctagttccactttttaaaagttctctatttggaaggtataagttatatcttcctgttataatataaacccctactaatcgaatcttccatacacctctttttgcattctttaaagtaacattagtaaattgctgcccagaaaaagttgttgggtatatatacgttatagaatattcagtcccctctaaatcaaataaacctgttactttattataatttgaaattccaacacttttactttcttcaccagtgggagatactattattacatcagctttatctggtctatttaaccaaagttctaatgataattcttcctcgtcttcatttaactctaattcaacttcaacagaacctccaacatgtggtattattccagatgtatgtgtctgtgtattgccctcatttcctgctcctgctgttatacataaccctctagtaaagaatgctttttcactattgctcctattggttaaacctgccaagctactggtacctaaagacatatttataactagtggtcttctaagttcaaaagcttttttatatgcatactgagatgcagcaaacaacattgcactattataaaaaccatctatcttaccgagttttattattattagctcagaatcttctgctatacctgcatattcactatttacatttccaagccctgagcatataccactcaacatagttccttgaccaacttcatcctgagatagactagggtcattttctgcgatagctcgatttatatcttctcgtgtatattctgtcccaatataaaaaccatcaggtggagttccttcttttgtttggtcccataaatatactatttttgaagtaccatctggataaataaaatctggatgtagatagtctattcctgtatctgcaattgatattagagtccctcttcctgttatattaatattaggattatttttaaagaaatttacgcccatttcttctgttgcaactacacctccaaaagtacctcgattaatttctccaagtaatgtcatctttgtagtcgatacagttcttatgattgaaggaagttgcaaaactcgttgtatactactatagtctgtattatttatagatagtacacctaatgaatcacttatcttaaaaaaattttgactcatacctaacccagctagttcttcttcaaattcgggagtatggactacatctattcctgatagtattcctgattgtctacttgcatttttacttatataaatttcattctctaagtcattatgtatttgtatattataaccatctataaacttatacctattttcctcatctttaaatgacttattaatacttctatatccaatatcctccgtttctaaatcttgatttatactagatagagtgtacaaatctatatctgataaatttaaaaaaccaaatcctgatgaattatttggataagattgattacttaatctccttgctccctttaaaagtaatgcccttaatttctgtgaatacaaaaataaatcatttccatttacaattccccattccataaacaatgaacaaacccctgtaacatgaggtgtagccatgctagttccagttaatgctccacttgtacctcctggtaaaaaagatattatatcttcacctggagctaataaatcaggtttaaaaacacctaattgtgtatctccttcaccagaaaatatagatactatgtctgttcttgaattaaaactacctactgttacaactctacttgctgttccaggaactgttacagtaagctcttgagtaggaatcagaaatctagtatttctatttagtccttcagaagttggcaaatatatatttacattaccagttactatatctattggttcaaatacaattttccataacccaggagttatctgtgtatttgaacttaattgtagagtaactcttcttgtaagagagtacggtgctatagggtaaaaataaccagttattctagtttcacccaaagtatttcttatctcacctgaagttagagagattgcttgtgtttgattgtttgatgggtttaccaaatgtacactaaaatcatcaacaaaatctggccatatatttatgtttaatatacgctctccttccccaactataaactcaacttcttctgtaatattattttgaagcctaatccttttatgacctcctttatctgcattatttccagctgctacaactatattgtttttccaaaataaacacatatcatctatatattgttcaaataaagatgttcctctatgtgaaccttcattacttccataacttatatttaatgtaacaggcattcttaattctaatgccctatctaaaataaatttaattgccctcataaactctgtacttctcgaaaaaatatcggtctgtatatttccaactctaaccactattattctggcatcacttgcaatagttgcacaaatacctgcaacatgtgtcccatgtaaactagttgttgaaataggtatatacatacttccatctattgcattatttatatcttcattagtatataatgttccttctctaaaaccttctggtggatttccttgaatagattggtcccaataatataatatcttagacctcccatcactatctctaaacacaggtagagtataatctattcccgaatcaattataccaattatagttccctttccagttaaaccagttctatttttaaaccccgttattcctgtacttgaaaaactttgcacatcctgagtctgtaatataaaaggcttttctataaattcaatttctggataagttaaaagtgtatttacatcttcttcattacttgatgttattattgcatatgatgaattaagtatctctactgatacacctaattcttcttctaatctcaatatatctccattgtattttacaattaattcataatttattataatcacctcgacttctaaaattattattaatgtatatgttttgtgtaagtctaaaatgtattagactatataattttttaagtttcagttatacaatttataatagatatattaaaaaataaataatgatggtacaattttgaataaatcataccatcatttatatttactttatcttgaaagcattaaatttttcaatgctttttcaagaccttttacagtcagtggaaacatattaaattcactttgtatcattctttgagtttggtaccaataattaattgaatcccatccatctctaagttctggattcatccatacaattttactgtactttctcttaaaccttttaagccattctataccaggtgtgtaattatatggaccacgatagttaccaccaatatgaagtaactcagaaggcgacatagaagcatctccaacaattataactttatagtttttatctatattttttaatatccattcagtattaatagatttacttaaccaacattcaggtgttgtaaataatctatcataaatacagttatggaaataatatatctttacatctttaaaatgatttgatttacttacagactgaaataatgtattacataaagtgctataccccctcattgaaccacctgaatccataagcaataaaagcttcactgtattttttcttggcttctcaaaaaataactttaaatatcctgcattattacaagtctcttcaatagtcttatccaaatcaagctctgtctttggagcatctattctagtagaaaattgacgaagtctctttagtgcaacttgaaattgacgcatatttaaaacttcatcatctctaaaatctctgtattttctttctcctgcaacttcaagaacagctctaccataagtagaatttccacctatacgtataccagtttgcccttttcctgaatgtcctaactcggaagtgcctcctgtgcctatccaataattaccaccattatgaggagagtcttgttcttttattcgttcctccaatttagctcttaatttatcaagatttatatttggattttgttccaatctttcaaactcttctaaatctatatctggttttttaagccaattcataatctcttctggaatttcttcttggtgttctatacctttaaaatactccaaaaacactgcatcaaacttatcaaaatcactttcactttttattaaaatcatcctgcaaagatagtaaaaatttgaaaagtttgaatagcacagccctttatccaatgcttcaattaaagtcatccattcatttaaagatatatttaatcctcttgacctcaataaataaaaaaattcaataaacataattatccagctcctattaactataagtgtctttgcatagattcaatatcctcattattcttaagtagtattcctgcaaaaggaacttctttttctattttttcaataggcattccactcaaagttaatgcttgtatccagtctattaactctgatgtactaggctttttttgtatgtcctttaaacttctaatccaataaaaagtagtcattacttgttccaataggtgttcttctactttatcaaaatgtactttaactatttcttccatcatgtctctatcaggaaattctatataatgaaatatacatcttcttaaaaaagcatctggaagttctttttccgcatttgaagttataataactattggtctttgtttagctcttacagtttcttttgtctcatttatgtaaaactccattttatccaattcccaaagcaagtcatttggaaattctaaatccgccttatctatttcatctattaaaagaattacttgttgatttgagctaaaggcctctcctagtttaccatattttatgtacttgctaatatcatctacaccttctcctccaaattggctatcataaagtctttgaacagtatcatatacataaagcccttcttgtgcttttgtagttgattttatattccaaattactaaatctttttttaattcatttgaaattgcttgtgctagcatagttttacctgttccaggttcgcccttaatcaaaagtggcttttcaagagcaatagcaacattaactgatgccatcaattctggtgatactacataatcactacttcctctaaagttagatatctctttttttatcataaatcctactccttttaaacagtattttctaaatgtatatagactttattactatttttgatataaaaataataatacaatacatttgtatagtattattctaaaattctatatctaaataaaatcacctctaaaatatttaatttttatctttatttgtcataattaaatgaaatatatattttaaagaataataaaagatagcttattgtacaaaatttaaattataaaaacttagtttaatcaaaggcaccactttttttcattttagattatatataaacataatataaataatttttattattttagctataagcataaagttttaacgtatttataatttcatattaatcatactatattaatactgctttttattgtataataagctataaatattaactttaacttagatttaagtatatctaaatttaataaatataagaaaggttgtgttattttgcaagataaaaaaatttatctaaatattgtactcactgtagttgtttcatatatcttgattaaagttattgataattacaaatatttttttggagtgataagtttattaatgtcactactaacaccatttataatagcatttgtattagcatatatattcaacccactagtaaagttcttagaaagtaaattaaattttaagagaatatattcgttacttcttacttatggtgtactcatagttatactaatttcctttatattatttacagttccatccatagtaaatagtttagctgatttagttgctcaaattcctacatacatagataaaacagagcagttcttattcgacttaggtaagagtttacaatcagttgaccctaatacattaaaagagtatggtgacaaaattatgagtgtaatgcctaaatttagtaacttgcttattggttcacttggtgggatatttagcactacattttcagttggaaaatttatagtacaatttcttttaggttttataatttgtttctatatattattagaaaaagaaaaattcttactgtttacaaaaaaagtagtttatatttccctaggtaaaaaatatggagactttataatagaactatgtcaaagcttaaatttaaatattggtaaatactttacaggtaagattttagattcttttatagttggagtactttctggaattggtctttactttttaaaatctgaatatgcactattatttggtacacttatgggtgtcatgaatatggttccatattttggtccagtaataggtatggcaccagttgtaataattaatttattctccaatccaacaattgctttaacttctttaatttacttaataataattcaacaagttgaagttacatttatagagccaaaaatcgtaggtggacaactaggtcttagcccattctttacaatcctagcagttactgttggtggaggattctttggtatacctggtatgattctatctgctcctgtgatgggcgttataaagatatacttctgtgagtttgtaaatcgtagacatgataaaatacaaatggaataaaaatacaatttaattacgattttgtaatcaaaagttacagctgtgtaactgtaatattattctctttaatggtaatatttaattataggaaacatacaatattattaagtaatgaatcttatataattaaacatgaaagagggttttagtatgaaaaaagcacttatatctttattagttttatcttgtttgttattaactgcaccagtaaatgaatcttcttatgcagattctcaaaagaatgttcctgtaagccaaaatactaaattgactcaagaacaagctaaagaacttttagtaaaatacaacaatgaagttgattacatatatcaaggaaatgctagtgattttgaagcattaaaagctaaaaatcttaatggttatgtatttttaccagatgcagatggtgatattggttactttgtaaatgaaaatacttctgagatatattacttccacccaagtggatatcttgaattagttaatcaacaacaaaataataaataactaataaaaaatggatgcaaattgatataaatttgacatccattttctttttattttaaagttgtttctttttataaactttaaatacttttttaatcctgtgcttgctcttttataagtttctttatatctacagcaggttcatcttccatttttataacttttccttcccatgttctaagcataacgtaatctgttccttttgatacaaggtattgcggaagcaaaggagtctttcctcctccttttggcgcatttactatatatgttggtatagccattcctgatgtatatcctcttaaatactccatgatttcaagaccatcatctactgatgtattgaaatgttttgttccctttacatgtttactttggaatatataataaggttttactcttatttttagtaattcttgatttaaacatctcattacaaatttatcattatttattccatttaataatactgcctgatttcctaatggaactcctgcatttgctaacttttcacaagcttctttagattccttagttatttccattggatgattaaaatgagtatttatatatacagggtgatatttttttagcatattgcaaaattcatctgtaattctttgtggcattgtaacaagagtcctagtacctaatctaacataatcaacatgtggtatctctttaagttggctaagaatccactctaaataatcatcttttaatgtaagagcatctccaccagttactagtacatctcttatttcttcattttctctgatatagtctatagattcttggataatagcttttgacttatgagaatcttgttgtccaatatttcttcttctctgacagtgtctacaatacatagcacactcatttgttacatttattattaatctatctgggtatcttctagttatacatcctgctgggtttgtatactcttctcccattgggtccaaatcttcttgctcatcttccaactctatatgtgttggtatagacagtaattttattgggtcacatatatcttctgggtctataagactcaaataatatggagatattgcccatctaaattgagtaccaacctcttttatatattctttttcttttttagttagagttataatttttgataaagtatctacatctgttattctatttgataattgccatttgtagttattccaatcctcttcagttccatttaagatacttaatattttctgttttcgtttatttatctcttcttctttttcaagacctctgttaatcgtttttctagcctgaatataatcatcaatttttgattttaattcagcagctctctctaaggatattctagtttgttcattcataattttttgctatcaaagttaactacttgtattatttgatagcgtcctcctttctgatgtgtttatatcattctgataggcagatttaattttgccatatagattttataacaaatgaaattgaattaatttttgcattttttctgttatttcgcacatttatgaatatttttcaaccttcgtcaataaattacaataaattatgcattttttttaacaaatgattaattttttctatttttaagaattattttaccataaaacgattatattttcaagattattaaaattaaattttttaataaaaagtaaagtatttcattaaataataaaagcggaggtttattataataaatttctccgcctttttatttatttaattaaataatagtaaaataaatttaactcttaagaagtgactttattatattaagccctttttctaattcttctacatcttttggagctgttacacaaatacgaactgcttttggaactgtagagtttcctactgaaaatcgttcagcacaatatacttgaactcctagattttttgcagaaatttcaaatgattttccatccaattcatcaggaagaagtaaccaacgaaaactgcaattcttatcaccaatcaaattataatctgacaaaactttatcagcaacttcatttctttctataattgcatctcttttctcttctataattttatctataataggagaatataataaacgatgtactatttctgctgtaaatggagaaaccattagattcatattatatagtgcattttctaaattttctatatatcgttttggagcaactacaaatgctactctaagaccagcacataaaaatttagatgtactaaaaatatatatagtattatcactagctaaagaaaatatgggagtttgtataccgtctctaaaaatgctatttatagcatcttcaataattattatattatattgctttgctatcttggctatctttttacgagataaatcagacatagtatgtgtcgttggattatgataatctggtataagatatatgccttttatattttcatttttacaataactttcaagatattcaatcgatatttcattattttcttgaggaattgggactaattgaatacctatcattttagctattgacttaattccagaaaaacttaaagaatctgtagcaattctatcaccagctttaaataatcctagtaaagttgcacatatagcattttgccctcctgtagataataatatattttcttcactggtgtatacattatttctttctatccattttgcaattgactttttttgcatatatgtgccagatggagacatgtattgtaaaaacctatccatttctggttgttttagtacatttttaataaagtcaataatatatgtattttgctcatatggaggatgaactgtccctaattcaattatgtcttttgattccgtttgatataataatgtattacttacatttacatcagaagaaatgaatgttccctttcccacttttgcacatattagtcccttttcttcgcaaagtttaaatgctcgtgttattgtacttaagtttaaatctagaaaatctgctaattcccgttgtggaggcagtttatctccaggatttaaatttcctcttttaatatcttcttctaataacattgctaaagttttatatattggtggttttcggttatctaattttggtttccatgtcataggatagttttcaaaagaatttattggcatataattactcctcttaattataattgtactccatacaattttattattgtatgcttctattttagatgctatacttgtatttgtaaatagctatttcaaaataaataaataagagaggtataatatgaagactataggcttaattggtggtatgagttgggaaagtaccattacatattatcaagttattaatacagtaataaaagaaagattaggtggactacactcttctaaatgtatactttacagtgtagattttcaagaaattgaagaatgccaatctagtggaaattgggaaaaaagcgccaaaattttagctgatgctgcaattaaattacaagaggcaggggcagattttattgttatctgtactaatactatgcataaggtatcagataaaatacaagaaagtatacatattccattacttcacatagcagatgtaactgctacagtattaagggaaaaagaaataaaaaaagtggccttattaggtactaaatatacaatggaacaagatttttataaaaatgtaattattaataatggaattgaagtcttaattccaaatgaagaagaccgtataatagtaaatgacacaatatttaacgaactttgcttaggaattatatctgaatcttcaaaaaaagctttcttatctattatagataagcttggcaaacaaggtgcagagggtgttatattaggatgtacagaaataggtcttttaattaaacaaaatgacacttctattccactatttgatacgacagtaatacatgcaatagaagccgcactaagttcaatttaagacaatattgattaataaaaaaaatatctatagatttgtgtaaataagactttttataatttatattactagagattttaaacctatatattgtaacaaaaaaaggatagtataattaccctatactatcctttttcttaatttaatatttaaataaactcaacactttcaatttgtatacaaatctatcttacatttataacatcactattttgagagctatttccattataatttgcaacaacataaatatctagatttaaatctccttcaggaatacttatagtatgctcatttccctgtatatcactttgatatagattaaattctccatctccattagtattattttttacatatatactgtaagtacagtccttatgagatatactactccagttaactctaatgacattattatctctatcaacattagctgatatattttctaccctcatatctttaatattattatcattatttgaatttccatttccattagtaatatttattacattacttggcttagttgtatctgaatcctttttccctatgacataaatatcaaaatctatattttgattacccttcatatctacttctatagttgcatataccttgttagacttacctaaatcactttcatttatagttatagatttaattttcttaaatgattctcctgacaacttatctttaagatatatatcataatcaaagacatctttcatataatcccattcaagtttaataataactttattgtttactattttatgtgaaccaaccaagttttgtatatagtcattcgttatagtttctttgactactgttactgttattactttagatttatctccacaagttattctcaccctatctttaccttctctaagacctacaacatttccattactacttaaacttattgctctttctacaggtaattttgaatctactaactcataatatatttttggtggttctaaaccaggtggagaagttattatatctggtttcaatttttcattttggtcaacttctatttttatatcatccatatttatttcagcaactctagcttgaatcctaaatgttctctcaatttctttatttccacacttagcatatattgtagctttaccaactccaactgcacttactttatttcctttgatttttaaaatattttcattgctactcttataaactggcttatatgattttttaaacttatcataatcaacttctattgtactttctatagtagcactatcaccaacatgttttaaatccccattaatctccatatctagtgattctacctctgggtctactacttttatagtagccttttttaatactcttgaatttttcatgatacccacagaagaatacccaacctttaatgctgtcattttatttccatctatttttaaagtccctgagttatccaatacattaaaccaaatatttggatttttagcatacgaaggaaccttaatatattcacctgtagacaaagtaactgtttcatttaattttactacatatttatctatatctttaacatattccccatctacaatttcaatttctactccctttaccattggtctaagtattccaaatttaaaaaggtagtactgcgcaacaagcaatataggaatagatataattatggcaatttttctgtatttcttattttttacaaatatcatctatccacttccttttagcctaatatataatcatttgttttgtaagcaatctacctaagttaaatattgggataaactggaaaattattatatttcagaatatccctatactaattataaaccataaatttaaaatttaaaactaaaattaatgttaatttcttactattacaatagtctaattttagtgaaataacatttgtcttgtcagctgaaaagttatataattaattaaaaagaaattatacttatattatatgaggaggattttaaattggaaatcaattataaaaaaagaaatttcaaatcatttgctaaaagaaaaaatattgaaatttctgttcaaaggtatcttattgacgcactaagttatatggcacttggtcttttttcgtcccttttaattggaacaattttcaatacattaggagataatttcaatatttctctttttactgaagttataagccctcttgctaaacaggttactggtccagctatagcagtggctattgcgtatggacttcaagcacctccacttgtactattttcttgtgcacttgttggagcttgtggtaatgaattaggaggacctgttggagcatttgtcgctacactttttgctgtagaggttggaaaattagtttcaaaagaaacaaaaatagatatattggttacacctgctgtgacaatactaattggagtacttgtagctgaacttattggtccagctgtttctgcttttatgacttcatttggaaatataataatgcaagctacaactatgcaacctataataatgggagctttagtctctgcacttgttggaatagctcttacattacctataagtagtgcagctatttgtatgatgttaagtttaggtggtcttgctggtggtgcagcaactgtaggttgttgttgccaaatggtaggctttgctgttatgagctttagagaaaatagagttggtggccttgtggcacaaggtcttgggacatctatgttgcaagtacctaatataataaaaaattggaaaatttggataccacctactgtagcttcaatattacttggaccattatctacaacaatattcaaaatggagaatattcctattggttctggtatgggtacttgtggattggttggacaatttggaacagtaactgctatgcaaagtgctggaaaaggaggtatatctatgtgggttggtatacttttacttaattttatacttcctgctattgtaactttgttgatttcagaatttatgagaaaaaaaggtctaataaaacctgaagatttaaaactagatgtataaattaaaaactactccttttacttatataaaagtaaggagtagttttttttatgaaaattccaacattttttttaatagccaatccatagaacctttaacttcattccaaaccactatgttttcatcatagtaatagacagcttctgccttttcttcctctgtaacaaattctctaccaaaagcatttcgccaatctaacaaatataatccaacgtacttatttttacttctagcaaccttaatagaatcatttgccaaaaacatacttttatttttaaagtaataaagagctttactgtacatccatgtagcagatttttcttctttataaagttcaaataatttatttattgaagttctatcatttaatctaattaatacatttaataatttgtatcttattccctgctcatcactaggattaatttctattaaatattctaatacttttttggactcctttagattattaatactttctaactttctagcaagggattcaagtgctatcatataggctctggtagataaacctttccaaaatccaagttctttatcttctttagtaatcatacttttacctatatttacagcttcctccatatatctaattgattcaatatcactattcgcatcttgtgatagcttaatatatcttttatatagtatttttttcttttctaaatctaaatctacagactttgatttggaattggtctcttttacccaaaattctacattagaaatagctatagtatcttgatttaaaaagtcaatactacaaacatcttttattaaagacgatttattatttatagtatttaaagaaacacctatttgttttgaaaactctttttttgttatatgtagtggatgcttcttattgtataaaagattttgttctaaaactatatttagtatagctgaagaccatatatcagctctagaagaatgaattatctctttattattatctaaaaggttttgcaaaattttaaagcttatatctttgtattcttgatttaaattggagttgcaaaatctatttatcttgtccttaatttcttctatcttgcctgtcatgactcctcctccatattttacatatataaaactagtgctacaaactcaagatcttcttctcctatattttctatagaatgtttttcgccatcagctgtatacactacatcaccctcatttacttctacaaattccccattatcaaatactttaccttttccctttagtatataatatacttcaaaatctgttgtatggtcatgcacaccaattgaacttcctactggtaaagctactcttttaaatagtcttccttttcctttaagctcttcattttgtattatgttttcaagcttaacctttcctataccaccatttaaattttcttttacttctacttgtaattcagatttctttcttatcatagctcatcccacctgccaaacaatcaatctaactactaaattggcatatcctttccataaatatgtttgtattttaatataataataacatatattatcataaaaaaatattactgaatacacaaaaatgatactatttttacatatatttcgacttaattaaattatcttacaagttgacgtctatatgaaaaaaacatatactcatatagtatggtaaaattttgttaaactatttatctggaggttctcgacatatgtcagttttaaaaacgcaagaaaaacttaaacaacctagagatttatatttctgctgttcaatatttacctttgtaggacttgcatactatggtatgaaattggtattattattgtttttagctgaacaagtctccaaaggtggtttagggttaacaccagcagaatccgcatcaatgcttgcatcttttttagcatggacttatttctctccagttattggtggatgggtcagtgatagatttttaggtcccaaaaactgtattatacttggaatgctaatggtttcaattggttattttctaggatacatagcaaatagtaagatggatataaacatcatgatatttttatctggattaggaataggtttttataaaggaaacttacatactatggttggaaacttatataccaatgatgacccaagaaaagatggagctttctctattacgtatatggctactaatctaggtactttatttggccctttaatatgcggtttagttgctaatgaatggtttgctatgaaaagcggattatctataagtatgtatggatatagatatgtatttttattttcatcaattacggttctaataggtttattcttctttatatttggaaacagaaagttttataaacctttgaataatgaccctagtaacgggagagagtctataagaaaatcactagaatataagaaaatgctcgcttcaagacctttaactttgattgagaaaaaaagaataatagtaatattggtgttagcttttttcacagtatttttttggatagcatataaccaagcctctatgtctattgcactctatacaaaggaacacataaatcttactgttggcaattttcaaattcctacttcatggatagattcatacaatggtctcctttgtgttattcttggacctatctctgctttagtatgggtaaaattatctcaaactaaaaaaggcgatttaagtgtgccaaaaaaaatgagcttaggttttatactattagctatagcatttttgtttatgatagtagcagttatacaaacaggaacagaccctaattcaattcacaaagcaagtgtattttgggtagttggatttttaacattccaaagtataggagaaatttgcttttctccagtcgggtatggtatggtaaataaactttcgcctgaaaagtatatttcattcctaatgggtgtttggtttttaggcaaatttgcagcaaataaattatctggctatacgcaagctattatagaccaacttggtatgttacaagtcttcatagtgataccatcatttttattgatatttggaattatactacttataatgaataaaaaattagtagaattatcaaattaaaaattttttaaagttaataaaatatacaataaaaaatcgaggcattataatacctcgatttttattgtatctagtacaaactatatagctctagtgtaaacttttaaccattctctttcttcatcagttaagaaaggtgatattttatcataaactaacttatgataccagtttaaataatctttttcatccttattcattaattctggtactataccatctaagtcaataggagctaacgtaacaacttcaaattccataaattgaccatagaaattcttttcagcttttctaactacaatttcattctctgttcttataccatgagaaccttctatatatatacctggttcattagtagttaccattccttcttcaagaactgcactatcaaatctttcaggtactactctccatctaaatccatttggagcttcgtgaacatttagcacaaatcctataccatgtccagttccacattgataatcaattcccatattccacatgcaacttctagatagtatgtctaagttatatcctctacaaccatgcaagaacttagccttagaaagatttatcattcctcttgctacagaagtaaagtgtagttttaattcatcacttataggtcctaaaactgtagtcctagttatatcagtagttccatcataatattgtccacctgaatctactaaaaataatccttctgcctctaatttataatttgactctggagttgcactatagtgcatcattgcagcatgctctttatatgcagcaattgtattgaaacttggctcaaagaaaccttcttgctctcttcttaagtcctctaatttttgagtagcacttatttcagtgatttccatcttacctacatttttctttaaccagtacataaatttagtgaaagccacaccatcttttacatgtgaatttcttatattttctaattctacctcatttttttgagctttaaaaaacattactggattgaactcatcaactttctcaacttcacaaggtatattattgtaaattgtataactaagcttagttccatctaataaaactttttcagttttgtctatattttttacaaattcatacacatcattatatggctttatttgaacattttccttagctagttcatctaatatttcttcatttaacttactttcatcaacaaataaataaacttcttttaaagttattactgcataagaaagtacaactggattatatttaacatctccacctcttatattgaataaccatgctatatcatcaagagtagttattacatgagtagaagtacctttttcactcattttttctcttaatctagctaattttgagctaaaactttctccacaatatttaacatctaataaaaatgctttactatctgataaagcaggtctatctggccatataccatctattaaatcatactgatattctatctttataccttttttagataatttttcagctaatgtagctccttctctagcagatataactctaccatcaaatcctaaagttcctccttcaggaatatttttatataaatattcatctgtagttgggcaaccttcttgtcccattttgaataattttattgtacttccttctaattgagattctgcctgtataaaatatcttccatcggtccataacccagcttcgtctttagtcacaataaccgtccctgctgaaccattaaaccctgatataaattctcttgatttgaagtaatctcctacatattcactttggtgattatcagaagatggaatcatataggcatctatatttttttcttccataaattttcttaatccacttaatctatcttttatattcacaacaagacctcctcgaaataatagtttgaataactaaatatataagtatgtaaagtttattacataaatattttttgtataatttatataaatcttatacactctaattatcacaattataattttaattataatatctatttgtgtaaagctttttttcataatcaaagaggaaattacatttaattttatatttaaatgtaacttcctttatttgaagtaattcatctatttacaataattcgtcatgaattatttttcttttgttagtaaatccatagccattaatcttgttaatacatttcttattcccaataatattaaaccaaatattattaaaactgttgctattcctccaaatatctgtaaaaaaccaagtgtggctgtaaaaccagcaatctttcctgataataaacttgcaaaaaaacttgttagataccaggctcccatagataatgtagcatacttagctggagctaatttattgaacattgcaagtcctataggagataagaataattcacctactgttgtaaatatataagtcaatactataaacaatatactagcctttaccattccatctggaccattagctaatgtagcaaataccataactataaacccaacacccattattatcattcctaatcccattttaactggaatagagaaatcacctcttttggtatgagataatttaacccatagggtagctaatactgggcataaagccacacataatatagcatttagtgatgtaagccatgctactggcatttcaaatccaaatagagttctatttacattatcccttacataaatcataaaagaactttgtgtttgatagtatgctgtccagaataagaccacaaataaaaataaaataaccattgctattatcctatttttctccaacttagtaagtggtccatactcaattttttcacctttattacctttagtcacaggatattttccgacttcatttaataattttggtgcaagaagtgtaaatataatcatacctaacatcatgcctataccacaaattaaaaatgccatcttatatccataagatactatatctccacttgctcctcttactgcaaatacattatcagaaagcaatccacatattattggagctataaatgctcctacatttactgccatatagaataaactgtatgctgcatcttttcttgacacatcagttttaggatatatatccccaactatatttgaacaacttgatttaaaaaaaccatttcctaaaataattattgatagacctacccaaaccatggcaatagatgtagatgaagcaaatagtacgaaatctcctattgctattaaaagtgcacctatagaaatacatttttgttgacctaaaactttatctgctaaccagccaccgactaatggtgtaagatatataagacctgtaaataagccaaacatggatgttgcttcttgagtagaaagacctaaaccaccttgagctacacttgctgtaaaaaataataccaataaagctgttaaaccataataactaaatctttcccacaaaattgtcatgcaaataagccaaaaactcttcggatgaccactttttttagatacgctttctgtacttgacataaaaaaacgcccccttttgttttatagttgaatttaatattaatattgctttaaccattttagcacatacttataatatcatcttttctatgtttactcaatagattatcgcctgtattttcatttttttattattatttttaaaattatgaaaaatattatttttttagtatcttcagtagaaaatcttaatatatatatatttaaataacaacttaaatattcaattcttttttgtttattttttcatttttgtaaattttcattaaaaaaattcaaattaaaaatatttctttttaatatttttttgcatgttatttatttatcacttcatatatataaatagattttattacaaaataataaaagctactttagactctctatattgagagtaaaaatagcttttatccatacagttaatttttcttttttttaataaattgactttatctattctttagctttcatttgatatttatctgtaattttaacattatatttttcttttaaattttgtataagtaggttttgtttttctgatgttaaactgcttactaaatctgattttacctcttcaaatggttgatatttttcatcagttttcttaattatatgatatccataatcactttctacaagtttgttagatacctctcccttcttcaatgcaaaggctgctttttcaaaagattccaccatctgacctttaccaaagaaacctaaatctccacctgattctgcactactatcttcagaatattttttagctagagtagcaaaatcttccccagcttgggcttttttaagtatttcttcagcttctttcttaagttcagcttttttgctactactaacttgcttacctttatcatcaacagtttttattaaaatatgtgaagctctaacttgtaaataattgctcttgtttttattgtaatagttctctgcttctttatcagtaacttttgatttttcatttaaatattttgatgctactagctcttttttcatatcatcttttatatatttttcagtcaaatcaaactgttttaaaaactcttctttagtcattcccattgctgattctatactactcattaaattattatactgagcatctagttggtcattagttatacttattttctcttttgctgcttcagaggataatatatcagatgtaatcatagtttcaatcatatttgattcatatgaacgtatttcgtcatcagtcatagtagtttttgcatttaaataaaataatggctccattctctttcttaacatttcacctgttatttttttatccccaatagtagctactacctcactgctattatagtgttttgaagtagcaggcaattttcttccagcttctttaccaaaaacatagcctccacctaaacatatagctcctactgcaacaattgctacaatagctttaagtgttttgttgtttagctttatttccctttttttaactttgttatcagtatttttttcatctgacacatcatcttttttagaatttacattatctgaatttttaggttcatctaatgtattttcttttggatttttttcttcagacattaataccctccttaattttaattgtgcaatacttcacctttattattttacattaaaataatattaaatgtgtgaatcagaaatgaaactcttatgaatttaaaatgaaattaaatacttctcaaactataccttataaagtttcttcctacttttgtatctccatattttaacatttgtataacttcattcttttccttttgcaaataaatggcacattcttctaaagacttaaatatttctaaaatgtcaccttttttatttactaattcaacttttttctttccaccccttttgattatagacttatattttttaaaatattcatcatattcttcatcaatacattcaaatctataattcatttttaatgcttcaattttatcatttgtcaaaatttcatttcttttttcattagaaagccttatactaaatattttattgtttagaatattaaatatctcagatggagatttgctattatcgagatagctccattcacctttgcagtattcatctatatttaatacttcacttaaataatttattgcatctccaaagtaatccatatatccatattttaaattttctcttatgtatcctaatggaactttgagttttttactacactgtatatgagtgtcaaaaacccactcttctttagtatacaagtttatagcttttatactttttcctctttttattttaatttcttttatgtactctaaatcttcttctgtcaaacattcacttacttttttttcttcaataacatttttttctagattataattttcattttggtcaagtccttcaaacttatttaaacctattttttcactttcaacttgaacttcttttttacataattctatgtttttatcattaataattgcttctttatcatctaattttatggtattttcactaattaaccaatcttcttctattattttttcttctatttcattatcatcatttactacttctactttagttaatatttcattatcaatattaactacaactccttcttcatctatcaacttttcttcagataatattttttcgttttttaatattacttcaccttcttcttttactgactcacttttttgtctttttttcacaataccaaaccacttttttaacactcaatgttcctcctaatactttattactattctatactatcatataaaatattactgttcttataaatcacttaattttcatatgtttttgatatgatactcctcatgtttaaagaaaagatattcaagtgaaaaagatgacctatttctagtagcccaacatgacatcaaacttaagatatgcaattactgttcctaaactaatccatacatcaatttaggctagtagatttttactttctacaccactatcaaaaaacttactattatacttaggatacaatataacatttacataaatagactatattatcatttgatttgtatttattgcccataatggtattatatattaattatttacataatccaacaatttctatctatcaccttatatcttatatgtaaaaatacattcaataataattataaataacaaaaatggatttaattaatcatatagaccttgaaactcaacatgattaattaaatccattataattaatataaaaaatttaaaactatatattagatttttttactataaaaggaatagttataattgtgcctattaaagcatctaccatatcaatcatagtatcttctaaccccccggcctgtgtagtagtcccaacaaaagtatccattaaaaattcacctatttcccataaactcgctactcccatactaaacataaataaaaatataactaaaaacactttactcattttacttatctctctttgtgtataaaagtatttaattatagaaaaagccacaatacaagatattatacctgaccataaatgcaaaaaatcatcataataatttatatcataaaaattaaaacaagtacctaacaatgatgaaaacattataaataaagcaagcattatatataattctttactcaataatctttcagtttgcttatttataaaactcaaaatgaaagtaccaactaaactaattgctactagacctagacttccatattctttgtttgctacaaaaaatacggcagataaaatataaactatatacaatagtatagttattggctttaaaagtttattcatatacactttaccttcctaaaaataattttataataacttaggattaacatcattatcaccatgtccataaagttttaatggcttaagagctggtccttcaagtatatttcccttatagtcaaatctagaaccatgacatggacagtcccatgttttttcttcactgttaaaattaagttcacatcctaaatgagtacatgtcgtgtctacaatataaaaatctccattatcatccttatatacaccatatctttttccatcaatattaacaatctttccttctccattatttttaggcatatctccactacctatttttaattttccacttacataatttattgctacgtttgcattttcctttataaaatcttttgaaaagtagctacctaatctggatggattaaaagtatctttataatcagaattattatttattatcaaatcttttattattattccagcagcagttccattagtaattccccatttagagaatcctgtagctacataaatattgtcttctcttttgttgatataaccaatataaggaacattgtcaaaactcatattatcttgagcagaccatttccccttaaaatcttttaccttaaagacttctttaccataatgctctaaatcatcaaatatttctttctcagttcctccctggccaactttatggtctcctcctccaaaaatcagtaaattttcacttccattattatattgtctaaaagttattgatgggtcatctatacttataaacataccatctgctaatttattttccaaaactgcaaccattaaataagcacgctctgcatattcttttgcaaaataaaaattcaatccatcataccatggactatgagatgaaattataacattctcagcttctattatattatcttctcttgttttaaccctacatatttttcctttttcaagatctactactggtgtattttcatatatttttagccctaaatttactgctgcttttgccaatccatcaatatacttctttgggttaaattgaccttgattagtaaaactaatagccccctttatatctaatggaatattttctatagtttcatgatactcacaatttattcctatttttttacatgtacgatattcatctttaatattctttatagtatcctctttttctgtaaatacaaaagaagtttcccttttaaaatcacattttatattgttttcttctattatttgttcaactaaatttaaagcttcattatttgcattataatatgattttgctttatctaatccatattttttctctatcttagagtaaaatatatcatgctgacaagttaccttaccagtattccttccagaagttccatatcctattttatcagcctcaacaagcactacttttttaccttcttttgctaataaatatgcagttgtcaatccagttattccaccacctactataagacaatctgtttttatattttcacctaatttgttatattcttttggacttgagtttaaaaaccaatatgattcattcatttaaaatactcctttacatattaaatagtaatagttttcccatcatggagtttatttattataaatagtataaaaaataagcttaataaaaagctaaatgaaaaatcacttagttttcttgttttatacaccagactaaacttatatatatttataatttctatattattttcttaatcaatagtatttatgctaagtaaaaatgaggatattctagatttcaatacataagattatattgtgctaacaattataaattgttagccaccaacttttttattgatttagttcgtttaatatttttctgatatgtaatataacaatctctctataaaaatatttacttaaaaatttattttatataaattaattgtaattcttacttatattcttttgtaaatagaaaaggagtataaaataatagtataaatatcaatctttgtataatactatggtaattaataattatttcagaatcattgaaaattaatcctaagctattaattagaacatgcattatagagcaaaaccatatgttcttagttttcatataaacataacctaaaaatatagaaagtccaataccatatatcaaatgggctatagctccaattattggagtttgaggactatatagtgtaaattgtaaaggtaagtgccataaactccaacaagtgcctaccattacaatacctatttttttgccaaatctatcaaataaaatactttgtaaaaaagatctccaaccatactcttcacataaaaaaggataaatatatactaatgatattataggaagaagaatataattcaagaaattcttataatcaaattgattatcacttattattaatccaaaaataatttgagaaaataaaaagtaaaaaactagcaaaatacctatcttaaaatttttaaaaatatataaacttgttattttataagaataaataataacacataaactacttattaaaattaacataaaatacattaattgaaattgattaatacttattaactttaatgattcaataataaatataaaaaagtaaataataaaaaataatattactgatgaatagaaattatatttatcattatttcttccttctgtgtaaaattttgcaatagaaactgaagataatggcaatatcatcataaattgagctaaaatttctgaatctattaaatgattaaaacatattgctaataaacctagtgaataagataaaccataagttatagaaaaaaatattataacttgtagtttttttctttttatttcatcactgacatatgttggctttaaaaagtttacccattttgattgtaaattcaacaaacataacctccctttttataaaaaataattgtaaaaatcataaaatttttctacttatactcatatcattatatttctatatatttataaagtccttattacttacacgactgctgactaaactcttataattctttttttgaatatgtatttacagaagaaatatccaatttcgttagaaatttattcttctgtttaaaatttatataaaaatcatttttatgcaatcagtttactattatttttttaatattacaatatatttttatatacaaaaaaatacaacaaatattattttctagttcgagtgaatattaaaataatatataattttatttatattctaacttaaaaacaatttaaatacaaataaagcaaaacacacttattttacttatataaaaataaaagactgtcaagataacaattacaaatcgttatataacagcctcataaaatccttattttaataaaatccttattttaataaaatccttattttaaaataattcagcaatatattaatttttataaaacatcatattttaagttcttgaatatcctttaattgctatacttcttgatttaatggttttttaagtaatgctaaaagcatcattccaaccaaagcacctacagctatagctaatatatatgcaaatggatgggtaaccactggtataacaaatactcctccatgaggtgcacgaagagctgcgttgaacaacatactaagtgctcctgccactgctgaacctccaacacaagctggtataacatgaagtgggtctccagctgcaaaaggtatagctccttcagtaacaaatgataatcccattacataattaactttaccagaatctctttcctctttagtaaatctattcttaaaaaatgtagttgcaagagctatagcaagtggcggaaccataccaccagccattactgctgccattatttcaaactgccctgattcaagtgatgcaactccaaatacatatgctgctttatttacaggtccacccatatccacagccatcattccacctaatactaatcctaaaactatttttgaagttccgcctaaaccatttaaaaatccaaccattgcattattaattgctgtaactggaggtattactaaaaatgtcattataattcccatcaaaagtgttccaagtaaagggtataacaatactggttttattccttccaatgaagctggtagtacactaaatattttcttaagcccttctactaaataacctgctataaaacctgcaagtagtgcacctaaaaatcctgaaccaccatcacctgctagagcacctcctacaaatcctacaacaaacgctggtctatcagatatagagtatgctatatatccagcaagtacaggtaacataaatccaaaagctttatctcctatccctttaaaaaacgctgctatcggtgtatttgaaccaaagtttgaagggttaatagtataatcatcaagtaaaaaggctatcgctataagtatccctccaccaataacaaatggtaacatattagatacaccattcattaagtgtttgtatacttttctaaatccactttcactttcttcatttgattcgttgtgacttccatctcctccatggtaaattggagcatctccatttacagccttgtctataagttcttccgctttgtgtataccatcagccaccttagtttttatgacttttttgccattaaatctagccatctcaacatttttatctgctgccactattatacatgttgcattttctatttcatcttttgtaagcttatttttaacacctgctgaaccattagtttctacttttattgatacacctttgttttctgccattttatttaaactttcagctgccataaatgtatgtgctattccagttggacatgctgttactgctaaaaccttaggatacttattagcatcattctctttagtatctattatatttttttcagccactttctcatcttgatattcttcactgaatttttctctttcctttttatctattatttccttaaattctttttcagagcttgaatttataagtttatttctaaagtcttcatccataagtattgtagataatcttgataatacttcaagatgagtattgttagctccgtctggtgcagctatcataaaaaatagatttgataaacttccgtcaaacgattcataatctataccttcttttgacactgctgctgctatacaagctttagtaactgaagaatttttagcatgaggtatagctacaccttctccaattcctgttgtactcatttcttcacgagccaaaattgcttttttgtagttttctttatcatttaaatttccactatttgcgaccaaatctactaattcttctattgcttctgatttggtttttgaatttaaatttaacttaattgacttttcatctaataaatctataattttcataaatattaattacctttctatatattttttaatattttaaaactgctttacagatatctcatttaccaatttatcaatgtattctcttttggctaagtcatatgaaaaagcagttgcactacctgaagctgctcccaatttaagagcataatcatatttcccagtattcaaatacccagatataaatcctgctaccattgaatcacctgctcctacagaattttttacttttcctttagggacatcacttataagcacttcatcttcctctgtaatcaacaatgctccatcttttcccattgataccaagacatttatagctcccatttcctttaatcttttagcatattttaccatgtcttcaattgaatttaatttaacaccaaatagttcttctaattcgtcgttattaggcttaattagaaaaggtttgtattttaaaacattaagaagaagatttttagttgcatctactacaacttttatattctttttttctaatctagccattatattttcgtatagtttttcatctaaagtagatggtatacttcctgccaatattaaaatatcatcttgatttagcttatcaagttttttatataaagtatcaatgtcttcatcatctatatttggaccttgtccattaatctcagtttcctttaacgcctttatttttacatttattcttgaaaaaccactttttatctttataaaatctgtcttcaattctttttcttccaatgttcttattatatattctccagtaaaaccacttataaaacctaaagatgtattatcatttccaagttccttaagtatgcgagatacatttataccttttcctcctggataaacgtattcttcttttacacgatttgtacttcctgtctttagctcatctagcttaactatataatctattgatggatttaatgtcactgtataaatcatattgccacctcttttttatttatttgctttatgtttatatcttaactttatattaatatccttgaaagtcaaaaaatttctcttaattaaaagagaaatttatcgtttttatcttatttagttttatattatccaaatttacaggtgtatatacaatactacccatctaattaaataaatttacaaatttttcaaaactactattttcacatatacttataacttttgctatagaatctactcttttatatatttttgaaaatattacttcataatctaatattttatctttatcaagggctaacattattattaaacgaacatctgatatttcccaagaaataggcttctttaatataccaattgctattttattatcaaaaatttttccaatagctccatgtggtatagttaccatattccctatttctgttgttgctattttttctctctcaaagtaagattttttcatatcctcatctatatagcccttttgtacaagtttacttgccataaaatctataacttcttctttccttttaaacaccaaatcagtaaaaaataattcactatcaaacaggctttttatatctaaatctaggtatatatttcctgtttctatatatttttcaattaatctaatttctttctcacttaaaattggagatatatttattactggcacatctcctacttcaataggaacagtagatattacaaaatcaacatctataacttttatatattcaactaagtatgaaggaataatctttagtatttctaatttttccttaaatatattctctaatttagcttttattaacattgatgtgcctatgcctgaagtacaaactattatagttttgaaaaccttatctttattattataagatgctctttcaactgctcctcctatatgtagagctatgtttgcaacttcatcttcattaatttctatcttcaaatctttttctattgtctttttagctatattagctagttcaaaagcaaatggatattttatttttatatcttgagccattataggtgattgatttatacctaactttatttttttacataaactactaatatgcttatataaaaactcttcaaataccttatcattacttatatctattgatgtagctaattttaaatttttacaaaatgtttttattgaatttattataatttctttgttttgttcattttctaaaattgagcttcttttgctcctataattttctatataattctctataaattctttttcattatacttatgtctgcttaacataactaatatattatttaacacactcttaaattctatatcagttaatactaatccattttcatttaatatgtctaataataatttttttattaatagttttctttcctttatatcgtcatttaaaaaatcatttaaactcaattgattatctctcttattgcttaagtcaactatacaatttaatatcttatcttcactttccaaaacacatataccttgtttatgcttagatttaactgatattgaatacttttccaatattctttttacttcttttaaatcattttttactgttgaaacacttacatacatagaatcggctaaatcttcaagttttatagtatttttttcttcattacttaaggttaatatttttctgattatatattctactctatctacatcatcatagagattgctatttagatttacctcatcaaaacttccttctagtttataaccaactcctcttattgacaaaattttaccatttctaagttgtttattaatatcctttatttcattttgtatagtttttgaagaacatcctatctcttgacttaaggcaataccactaattgtatcttttgaatttaacaatatttttattatatttatctgtcttgctgttatatttaaactcataaactcaccttttactctagatattgatttcttaattttcttatttcttctttatttaaattaaattctccatataaatatgcttctacactaatgtattcttcatcaattcttctaaatgcagttttcatatactcttcatttacaccaaatatatattttaaattttcttttggaatgtccttaaatttaggcttatattctataaatctttctatctctttatctgcaaaatcattactttttagataatctttcattatattctctctcgatacccctaaaatcataagaattatagcactccccacaccagttctatccttaccagctgtacaatgatttaatattggtaaattagaatagtctcttataagttctactaattttttatatgacggattatttataggcaaattatagtaactattatttaacatattaaatgcaccatctttttcaaacaatccatcaatcatatcttcaatagaaccaaaacttcctcctgattcttctagctctctcattgctggtattcttatattttttatatttgatattattgttgatggatgtttacgagcttcttcatcacttctataatcaaatatatatttaatatttaactcttttaaaatctttatatcattttcacttagatttgataattttgcagacctataaaataatcccttctttacagttctgccatcctcagttttgttcccacctaaatctctaaaatttttcatcttagcacctcttaaaaaccatatattatactttttttaatatctataaattaattttatcacaattttaagttctttatttaaaatattttttagtatttggttattaattgtaaaatataaaagtatctctttatacaaaattaacctaaattttacataatttatttactttacataagctttatagtttataatcaatatacagtagtatattttctgtaaaaaagaccatatttagaataatatcaaatacattggaggttttatattatggatattcaaaagcaaaagaattttataattaaatttacatatgtagttttaataacaagtattgtatatattgtattaaaattcttattgccattattaatgccttttgtaatcagttttatcattgcatccatcttaagacctattataagacttattacaaataatacaaatttaaatcgtacacttatttctatagtaatacttttaattttttatgggttgtgtatatttttattagttagctttggtgtgaagatatttgcaagtgtaagtgatgtattttttagacttcctgaaatatataaatcaagtatacaaccaacgctaaatactttattttcaaagatagatgctagtacacctaatgttaacctatcattaatacttggttgggataatataagtcaatctatgatgtctttagtagcttctatttcaacaaatgcactcaatgctattgctagtattgcaagtaaaacacctgcatttatgttaaaacttattattactttaattgcttcttttttctttacttttgactatcaaaaaatagtaaactttatcttaaaacaatttccagaaaaaagtcaatttatgataataaatataaaaaatagcagtattaatgctcttttaaaactactaaaagcctatgcaatactactatcagtgacattcttagaactacttattggacttactatcctaaaggttgaaaatgcatttactatatctgtcatcatagcacttgttgatattttgccagtcttgggtacaggaagtattttgacaccttggatgattatctcactcattaatggaaatattaatttagcaataggacttttaatactatacataattataaccgttgttagacaaatattagaaccaaaggtagtaggacaccaaattggcctatatcctttaataacattaatgtgtatgtttattggagctcaactatttggaatagctggattatttggattccctatcgcagctacaatcataaaaaacttacatgataatgggattattactgcatttaaatagtttaaccttgacatttttatttaaattaaaaagggctttctcaaacagggataagctctttttaattgttaaaatgatgaaaatacatttgattttatacaaaaagagtgcctcataaactaaaaagtctattctaagacactccctttttttctactctgcacaaataatatcaatcatttctttatattcattttcattatttaaaacatctatatttttaaatttttcttttattttttcttcaatctctaatgaataatctattgtatatggaataaatttctctacttcttttatatatcctacagaaaaaaattcagcattataaactacagaaaataaaattaacattaagcaatcattctttatcatagttattacagatttatttttattattaattttaaaactatctattaactcaatagtaaaatttattagtttatttacaactttatctaaagtaccctcttttgacatctctgtaataatagttttatggttgtattttaaatcttcttttatatcttgtaaatcatcagatatttgtaataaaaatccatatcctatacaaaactctatttcttcctttgtcataaatccacttattaaatatccatctactaaaacggatgaacctcctttttcaatagaaatggataataaatcttctttacacaaatgattttccttaccatgttgttttaaactatttacttgacttttaaatattaataataacgattcataaacttgtgtaaacttttctctagggtatacactttcaatataatctatcatttgagatactttactttcatgataatccttagatttaatatgttctcccaggagccttttttctaaccagttattaaataaaatcttatcatttttatctatatttgtattgtctaaataattatcagtatatggatataacatactatatgcaaagttagcttttgaataatatatttctttaccaaataataattgtaatgcatttgaaatccatacattcctcatagcttgcataatatcacctataggtaaatcatcatcaaattttctagcatctctaataaactgttttgttatatctaaaaatttttttctatcctctacatccattttttctaacttaaaaatattttctttttccaatgtcttttgtaagaaaacctcgcccttttttacccacatttttctcaatacagcatcacttggatacctctctaaatgaactgatattgtatttataaatttatctaattctttttccctctttttttgtgaatctttactatacgtttctatatcctcaaataattcaacactcgaattattccatgtattttcacactctttacaatagtatttaaatatgccacttaaatccatttaacagccctactttcatgcctaaactatacactatattatatcagtacatataactaatatacagttaaagttataattgtgtataataataactttaaaattatttgttttttagcttagctaatgcttctgcaaatggattattaaatgtctcttgatttttattttgattttttaaatattgattaacatctttttttgatgccttctgtttttcttcttgctttctcttgttgaaagaagacaacttttctctgtatccgcaactacaagtgaagattctcccctcaccttctccacgaagttctaattttttatgacagttaggacatcttgaattggttacttgtgatatagtttttctagtattacactctctatcttcacaaatcaacatcttaccttttttaccatttacctctaacataaatttaccacattctggacatctatttttagttaagttatcatgtttaaatttattatcactattttttacttctagtacaatatcttttgaataatctttcatgtcatttatgaatgtatttttactaagttttccctttgaaatatccaataatttcttttcccatgaagctgtaagttctggtgtctttaagtctactggaactaaatctaataattgtcttccttttgatgttatatatatctctttatttttcttttccattaaaaatgaattgaataatttttctattatatctgctcttgtagcaactgtccctagaccattcttttccatagcagtcaataatgttccctcatttaagtatggtggtggatttgtttttcctgaagttatctttaatcccttgaccttaagtacatctttttctaaaacatttggtatactttcatactcatcttcatcttcaatatctttataactttctttccaacctaaatttattactttgtttcccttagccttaaatatttctccttctacagttgcacttatagttgtctgctcatattcaaaaggaggagatagtactgctaaaaatctttttactacaagattatatatttttcgctctttgtcactaaaatcactcatgaataccttctgttctgttggtattattgcatggtggtctgttacctttgaattgtcaacaaacgatttattagctataatattgctttttaataatttattacaaatctttgaataatcactaatatttacagcttttattctatcttttaatgttccaacaatatctgatgttaaatatctagaatcagttctaggataagtaagtactttatgatgttcatacagtttttgcattatagataaagtttcttttgctgaaaatccaaacattttatttgcatctctttgtaattctgttaaatcatagagtgcaggtgaatattttttcttatatgacttgtttacttcagatatttttatgtctacaccttttactttttttaatatggattctatcttttctttactaaaagttgaagaattattgtttttatcattccaaataaattttatatctgaatttccctttgtagcaattaattctaatccataatactctttaggtttgaaatttcttatttcttcttctcttttaagcaacattgcaagagtaggagtttgtactcttccacaagaaagctgtgcattgtactttgttgtcaaagctctggttgcatttattccaataatccaatcagcttctgctcgtgctattgctgagtaatacaaattttcatattcttttccacttcttaattttgcaaatccgtcttttattgctttgtctgtacttgaagaaatccaaagacgttttataggtttttttacctgtgatttttctattatccaccttgctacaagttctccttcacgacctgcatctgttgctataactatttcatctatatcatttctattcatttgcgatttaactgtattaaactgctttccactcttttttattacaacagtcttaaggtgcttgggaagtattggcaggtcttctaagctccatgatttatatctttctccataactttcggggtcagcaagtgtaaccaaatgacctagtgcccaagttatcacatactttggcccctctatataaccatttttttcattttttgaccctaaaacttttgctatatctcttccaacagaaggtttttctgctagcactaatatttttcccatctaaaaatacatcctttctctatacataatctcatattacgcttaaaatctaactaaatagaacttttcttaatatcgtaactataatattaccataatttaatcatatctaattaattatttaagattttattatttttttatttaaaacttattttacacttcatttgtatgtgtattacaaaattcatttttacgtatattactcatctttctaagtttataattcgtaaataggcttacatttttatattttttctttgttttttaattttttagttgacaaaacataaaaacttatattaatattattaatacaataagctatgacaaatcaatatccggttaagattttatagaagagttgctatatagcacaccgaaggagtaacactctcaggtacttttaaaagtaggactgtaaaatttacggaactctggagagacccattatgggcgccgaaggggcaaggcttttatgctcaatctctcaggcaaaaggacagggattatctaccaaaaacagtatttactaatacttttattttggttgctaattagtgtacatccagagctgaatcttttttagatttagctttttttattacactagaaattattaataaattatacttatttcctgtcaattacttcattaaaaattctattgattatgtaaagcaaaaaaaatgagggagtgtttttatgaatctaattgatattttaaacaaagttgatgcttttatttggggaccacccctactggtactattagttggtactggtatactacttactgttaagcttggagttgttcaaataactaaactgccaagagctcttaagttaatattctctgctgaaaacaaaggtagtggtgatgtttcaagttttgcagccttatgtactgctctagctgctacagttggtactggtaatattgttggtgttgctacagctatcaaagctggtggacctggtgcacttttttggatgtggatagcagcattctttggaatggctactaagtattcagaaggtgttcttgcaataaaatacagaactaaagataaaaatggtcaagtgtctggtgggccaatgtattacatagtaaatggtatgggagaaaaatggagacctcttgcaatatttttcgctataagtggtatactagttgcacttttaggaatcggtacttttactcaagtaaattcaataacagatgcaataaataatagtttcgggatagaccctagaattacaggggttgtattagcagtatttgtagctttggttgtatttggaggacttagaagtatatctaatgtagctactaaaatagtaccttttatggcagttatatatgttgtaatctgtggaatcattttaatatctttttggaataaaatccctgaaacttttatgttaataattaaaagtgcatttacacctactgctgctactggtggttttttaggagcaactatgtcactggcaattagaaatggtattgctcgtggtgtattttcaaatgagtctggtctaggtagtgctccaatagctgcagctgctgctaaaactgaatggccagcggaacaaggtcttatatctatgacaggtacttttatagatactattataatctgtactcttactggattctctcttgttatttcaggagtgtggtgttcagacctaaatggagctgttatgacacaagcagcttttaacggagcaattcctacatttggaccaatattacttacagttagtttaacattatttgcatttactacaattttgggatggagttattatggagaaagatgttttgaatttctgtttggtgtaaaaggcatgaatgggtatagaactgtatttgtggctatggtgttattaggtgctttcttaaagttagaagttgtttggataattgctgatattgtaaatgggcttatggcaatacctaaccttatagctttacttgcattatcacctataatagtatctgaaactaaaaaatattttgaacatataaattctccagaaaatcagataaagaaaaatgcataaataaaaagtatagaatcccaagtcaattttatatggctttcggattctatatttttttgaaaaaatgtaataaatatatttacaaaatacggtgattaatataataaaacatagtaattgatataaataatacatatattttaattaaccacttcaatgaaaattatttagattaaaactttatttcttctgggtatttccaagattcaaactcatcaacatctactacttcaagttctttaaattgatttaatactaaagacctatagtatatttctgctacctcttcaacatatcttgattttaataatgcttcgtctaaatcattacctacagttgtcaacccatgtctttctaataagcatgcatctgtatctatcagtaattttgaaacgctcttagctaattttaaagttcctggtctttcgtatggagcaatatctacataaccgccataattaactgattcatatacaattggtataattggtttctttgctactgaaaatgctgttgcatataaagaatgagtatgtgatatagcatttatattttcccttattttatatatttcaatatgcatcaatacctcactacttggcttaatacctttctcaacttctattacatttccattcaaatccaatacacaaatatgttcaacgtttaattcttctcttcctatacctgatggggttataagtatatatccagtatccttatctctaatactaaaattaccagtcttttctttacataaaccataatgctctgctttaattgctatttccacaactttaccttttaaagagtctagcataattcacctccagataatcatttttgaccatagtatgcattttttccatgttttcttgaaaaatgcttattcataagaaccttatccataatattatcaggactcattaactctgtataataagccatctttgcgacttcttctaaaactactgcattgtgtacagcctcatttgcatcttttccccatgtaaaaggtccgtggtcatttacaattattcctggacaatgaattggatttcttcccataaattcttcaatgattacatttccagtttccttttcgtattcattgcaaatttcttctctagtcatttttctggtacatggtatgcttccataaaaataatctgcatgagtagtaccacaagatggtatagattttcctatttgagcccaaattgttgcccaacttgaatgtgtatgtactattccccccaattcttcaaactctttatataaaactagatgagtcggagtatctgaggagggtcttagtttgccatcaactacatttccctctaaatcaactacaaccatatcttctacagtcatattactatactctacaccacttggttttatcaccactaatcctttttctctatctatcccacttacatttccccaagtataagtaattagctttttcttaggtaattctaagtttgcttttaatacttcttcttttaaaatttctagcacttttcttcctcctatattttatttaatgtcatagttataaaatttaattgtttttagaattttttattaaatttttatatttctactaggattttattgaaattaatttctctcttgctcattttacttaaaaagtcacccacttcattaagacctattttatgtgaaatcatgggtttaaaaataatgtcaccttttcccataaaatccaatgttgcagtccatgctcttccaggataagggcttgcatatgaattccaagaacctttcaaggtaagttctccacgtaatatacactcagtagcgtctgcactaagtggtaattctgtgtgtgatatacctacaaacactatatttcctctcttttttgctacaaatagagattgttcttgtgtaaatcggctaccagcagtctctattacaacatcagcaccaccatttgttattttttttatttctttgattacatttacttcttttgagttaagtatatagtttgctcctagaagtttagaaagttctaatttttcatcaaaaatatcaactgctataatcttagatgcaccaaacacctttgcccattgtataacaaactgacctattggaccacatcctaacacaactacactatctcctactctaatattagactttgaaatcccatgataagctatagttgctggttcaattccggcagcagtttcataatccaatgtatctggtagttttaaaatatgttcttctggaactcttacatattctgcaaacgctccatttactcttgttccaattatattgtaatcatcacacaagccaaaattaccttcattacaataatcacattttccacaaggtactaatggtgcaacagctactctatctcctacattaatatgctttactttttctccaattttaacaacttcaccagaaaattcatgtcctaaaatcaatggatattttgtatttccactcaaaccacttaccatagacctaggcaaatctgaaccacatatcccaacatattttacatttacaagcacttgcgtatctgttatttctggtatatctaccatttcatacctgacatcacctacattatacaatactgatgctctcattttatctcccatataaatatctcctttcatgctatatacttctatatagcaatatctatgccatacaaaagataaatggtttattcaggcaaatgccttatatacaaagtcttttaccagtagagattacattttataaaattaaaccacattactgtataaatataaaagagtatgttttaaatagcaggttatacagaaaactcaactataaaaatacaatgcattataattacaaatattatcaaataaaaagaagtctatatttcatttaaatatttctcaggtattatctgatacttatataaaatcaattataaactcctttaattattcttatttcatttttataaacttaaactgctacaggctcttcttctacatttttaagtgcttgtttttctaaataatcaagaatacttgttttgttctttctaaacaatgcccatagaacaaagtaaattacaactgaaagacctatataaattggatttgcacttagaaatgcaaagaaaactaatcccatcaaaggttttcctagtatattaaagcttgttattaacattgctcctgcaggtatagctacacctatatttgtagccatatctgtaaataatggtgctgtagatgtacaaacatataatcctaatccaaaccaaattatacctgaaactaatacttttggtatattaccattatgtatggcaactaaaccttgaaccatatatggaattgccaacaaatccacaactggtaataccttattaccaggaagtaccatagatattacaagcattattggaattaatataagacctgatattaaagttgcaggttcaccatatccaacagcatcatttactgctatgtaccactcacggtttccagctttttgcataatctttctagctgcttctgttataggtgcaaatgcttgagcaaacatacttgctactttagggaaaatcgccatcactgcacttgtagatatacctactttcattatttctccccaagcttccatagtatttattctcgtcatattacctaatatacctataaacatacctaaaaaaagacctaaagtaattggttcacctaaaaaccctaatttcttctctaattcttttggatttaattttattttatttaatcccaatttattgtatatagggtctgaaaatactgcaaacacagaagcctcaacattatgcatagctattattgtacaattaggatatctatagtaactagaccatctctttgcaactaactctgatattaataaactatataagtttaataaaaccatacatgctatacctaaaggaaaatttcctgttactcctataaccattgctccccataccatataagaatagttattccataaatctgatggttgaaacacgtctgtccattttatcaaaaataaaattgtttgtaataatataccaagacctaaatatatcatacctgcacttgttgaaaatgcaaccaatgatgttgcttgccaaccaacatcaaaaactggtaggtttactcctgtactctcaaccatcctattgataactggtgttattattggtgtaaatgaatttaaaatcagtgtaaaaccttgtaaagcaactcctgcatacacagcagaaagaaacgatttcttagtagttactttaaatatctttgctattatgaatattataattggaactataattgcagaaccaaatgtatcgattatagatttcataaattctaacatctttttccctcctacttataaatatttataagcttaatttaatacttaagtgactatttttataattttttaatttatgacaacatataaaatgttttttccacaaatatttagttaatattagcttattatagtatctaaatcattgatttaaatactataaattcacgtctccaaaacttacttatctatgccttcaataacagtcaaaacttcttcaaagaatgcctcttcccctataccagttaggcaagcaaatgcatttatagttggtattccataatcgcctgtttgaagcggactcgtaaatgttataaagtcaaatcttcctgattgtgctaaatttagtgcttctgttggtctagcttctgttgtagtaatagaaatccccttattacctagtacttcttttaatttacctgctaccatagatgatgtaactgtccctgaaccacaaactgataatacattaaattgtttcataataatttcctcctaatttttcactctaaatttttattttatataagattaaacctattaaaaaaataatacttactttgattgttgaaattttaattttttatttataaaattctcctacattaaatttctataaaatccaataatttagctacttcttcttttgttgatgcgttttttatattttttaataactttatattttgaaaaactgacattaaatcttttaacagttttacttgtgaatctgggttctttactgctaataaaaatacaagttctacatcaagtctatcttttgggtctatcattgaattaaactttacaggatttttcaatatccctacagctacattagactcatttacatgctttgaatctgtatgtggaatagcaacacacatttctccaatatctagacctgttggtaatgtcctttctctttccaagacagcatttatgtatgtttcttttacatattcttttttacacattatacttcctaattcttcaataacactttcataatcattagattctaaacccaatgatattaaatctacattcattactctaactcctctcaatttttttgctatggctacagatgtttaaatttatcaaatataatccttctaaaagcatctttatcaaaacacttattggcattgttcataaattctgcatcttttagtatctcaagaacatttttaacaatctctttatcattagcctgaaaaactggcataaatatgaaatttacattacctacaccccaatcaataggattctttagtttaacaaaaacaaaccttgtactatttacagtagaagaatctccatgaggcacacctatagctcctttagaatatgttggaagcatttcttctctatgtaaaacagaatctaagtaatctttttctacatattctttatttataagaattgaacatacatattctaataaatcctttttaaaatatatatctggttcaaaaatcactaaatcctcatcaagcattctttcatacgatttaactggtctgtcatcttgttgttttgattttgatagatagatatccaaatttttgaaaagttctttattatagggtataaaatttatacctggtatcttagggtttattgtcccaacaatagctaatatattgtttgtctcttttagattttcaattttacaaaataaattttcatccaatgcactcatttgataacatttagtgttatcatacttttcttccaacgttttacttatatacttagcagttccttctccagtaagacataatgttacaattgcatttgatttatctatgtgtttttctaattcatagttatatcccatcctatcttttagcaaagaaaaaaatatttcatcaagttcttcctctcccatagaaacttttctagttgcttctagtgccattaggaggtctactctatcaatagttttagtgcttatattggttctcttatttactatttgacctatgtttgtaagtgaaccaatatccaccaaaaacaatatacctttcccttggtctattatttttgacagttctactgccttattgtatatatttattggtttttcatctaaaggcatatctatagccacaggaaactttacacctaaaagttctttaactacatttacagtctctgtagctatacgtccatgagaaattattattaaccctactttatcttttttcacttcattttttagagcagactttatgtagagtgttataaatccaatttcatcatctggaatcttaatactaattgattcctcaatttttattgcaaaacttttactaatttcatattcttttgaaaagtcaatctttattttttctaaatttacatttattatcttttgatttagcttaattctttttatagcttcttctaagtgtattgctagatatttgaacatatttttatttacttctaaattcatatttttttcaactatatcattcataagttcttttaccagtttaactaaactatcacttacaaaactatttaaatcactcattgaaaaaatttcttcattactatcgagattaaactttaagtcagcaaatctatttaaaataaaagtccataaaatattctctatatctatatcttcaatgtctagggattttaggtcataatatttcttttcaattgttttgtatatgtcctctggtaatatatattcatcacttaaaagacttccttttactgatgattcttctaaattaaatggtataaatatagcatttttcaaatattttcttatctctgtatattcaatctcttgaaaggcagcatctttaaaagaatctttaagctttaaaacttcatttatatctactactactatcgattcactatcttcatctttggaatttataaacttcataaaagctcttgcacaaagaacctgaatcatattttgtaattgtcctatatttccactaaacttttttagtacaagtatttcaatcacatttttatctacaaatatttttgcatttattctattacactcttgttgaaagatattgtatataaggtctattttctcttttagtaatctatcatgtaatggtggcaaagttattagcattggtatccttcttctgaatgttaataataaattagtctctacattttcagtagttgccccaatcaacataatacttacttttctttcagcattagtttcacctaatctcctaaactttcccctatctaagatagaaaatagtatttcttgaccttttggaggcaatctatgtatttcatccaaaaataaaactccttcatcagcttcttctacaagacctggtgtatcatattcagcacctgtaaatgcaccttttttatatccaaataacaaagataataataattgtggattgtcactataatcagcacagttaaatacaacaaaattggagctttcttttactatctttttttgctttgcaaactcatacatatgtctagaaaataaactcttaccaactccactttccccaataatcaacgttggtaatccttttggtggatacaatatagcagatttagcctgctccacagcatttctaagactccctttattacctatcagagtttcaaatgggtcattcgattcttcttcagattcctctactacatccatttctaaactttctttaggtaaaagttcctccacaactcttctcgatatattaaagccttctgtcatcaattcccttgtaatttctgatatagaaatattcttattcttttgtaatattgccgaaattgctgattttaaataaggatatcttctttgccttgaattacttatattaagttcttttctcaaattagttatgttctctctagttgtacttaaaaactttgctatttgaacatctgttaatggatcttttttattttctgtatttatgatgtttacaagtttatctctcaactccatgcttaataactcctttcttgataaatatataagcaactatcatgccatacttactttgatatttttttctacttaaaccctgtaagtaactagatgtcataagtatttatacattttgataagtatttacattttgtatatttagtaatttactaaatgtattagttattcataatcttaaataatttaactctttgtttaaattttaatgcaaaatactttataaatttatgattgaaaaacttgctcaatcatatataatagtacgtatctactcaacaataaaaattataataaactgtgtttttaaccctttctattttaagattttatttttatatgatagtatacatacttatataggtaaggttttagctatataaatagttttaacatgatttaatatggcatattatactattttaacttaaaaattaacttataaatattaaatttatatacagaagggaaaacgatatgaatacatttaaaactgaagttttattaaaatattctgcaaaagacatatttaatatatttacaaaatctgcaagactaaattttcctaattttaatgagaaaaaagcagtaggaacatttgtacaacaaaaaaataataaaagatttaaggttgaaataactaatttcgaaaaaaatagagtatatgagataaaaacaagcaataaaagagaaagtactattactagatatgaattagtacatattgacttagaaaatacaaaacttatttttattgaaagtgagagcaagaggaatatatttggaaaaatcaattcagctcttgtaagagtattgtttggaaaaaggcaaccagaagaatttaataaatttataaaaaaactagaaatggaattggagaataatagtgttaatttatagatataagttagattatatatttaaaatctatctaaaaacatatttctaagtattttatgagtcctactattcgttacaataattaatgaaaaaactattgataaacatgtgacactatgactatataccacattaagagtatcattagcaataataattttatgtattattgcttttagttaaaaaaagagagaaaaattaataatctctaatatcccttaaactttcaataaagaggataatctttatctaataagattatcctcttctaatttagaaaagatattaatttattcactatatagtatttttgtacaaatcaataaaaaatatatgtcatattcttatctctaatagaaaatatattcccctcttccataaaactctcaatatcttttttatctataaatctatactacttagttctcaagcataaaataatataaagattctttatacatgatgatatattatattgactattagacatttgtctaatataatcaagttaaaggtgagtgattatattgaaaaaaataccaaaatccgagttgttagttatgaatttcatatgggataaaggcatagataaaataccagccagagaagtagctaattatatggaaatttctcatggatggacaaaaggtactactggtaaagtactttctagattaagtgataaaggttttttagaatttgaaaaagatggtagaaatactttatacactattaaagttaaacatgaggaatatctaaaatttgaaacaaaggattttttagagcttatacataaaaattctattcatagctttatatcatcattaggttgtggaaatgaaatatcagatgatgacataaaagaacttgaacaatggctaaaaaaaagaaaataggagacgtattttatggaattatttatagaagttattaaatttaatatttacataagtctactaattctttttttcattttatttactaaaaagataagcaaatatacttttaagtttaattattttatatgtcttttaatagtagtcagaatgatgtttatatctaaaataaatttaaatatattaaatatcaataatactactattaatatctataaacataatctcgataattatataccatatgaccagggcattactttagatatatttatgtacatctggatattaggaattatagcaatctctttttactatttaagaacaaattttaaattttataattacatagaaaattttaaaaaagaaattttagaaatagatattactagtatcttagatgaacaagcaaaagaactaagtataaataaaaaacttcagatatataaggttaaaggtatttattcccctgccattataggtttaacacgctgtaaaataataattccagaaaaaaagtacaataataaagagttaagatttatctttaaacatgaattaattcattataaaagaaaagataacttatttaagcttctaattagtataatatgtatcatacattggttcaatccaattttatacttattaaaaaaatattttcatgaattatgtgaattatcttgtgatgaaattgtgattgacaaatgtaccacgagtgaaattaaagagtatgcatatataatattaaatacaataaagtatcaaaaaactttgaagtattcatcattcgtatctcagtttctaaataaaaaaaatattattttaaaaaagaggttaaattctatgtttaatcaagataaaaagaaaattaatttaggtcttaagtttttattaacctttataataatagggtcaatattttctatcaactccaattttaaacaaaatgaagatgtagaatatactattgctaagattaattataataaaaatggagaaacctatggtacacatataatagactcaaatggaaattccattgaaccagaacttatacaaacaataggtagaggtaaaaaagtcggctacgtaaaaaaaagagatttgtacgattgtgataatcaaccaaagacaccagaagaagctgttttatatacaagaaaaagaaattttaatatatttaaaaaaacaatccctctttatgataaagaaggtataaaaattataggaagatttgaaatcaattaaaagacaaaaactgatagaattatttcctatcagtttttatttgtatctttagaatttattgttttagataaagaaaaaatcaaattaataatgtgaggtgaaaacttatgccaattaattcttttgaaaattatcctatgaactggaaaccaaagagaccttcaaaagggcaaatattatataaggcgcttgcagaacaactagaacaagatatcaacaatggatttttattaccaggtactaaattaccaccccaacgtgaattggcagatttcttagatgttaatgtgagtactatctctagagcttttaaaatttgtgaaaaaaaaggtctaataagtggagttacaggaagtggaacttttgtatcttatgatacgcgttcaaatctattcttgatgtccagtaataataaaattacatttattgaaatgggcacaatgaatccagatttcacactagaagaaatgaatactttgtttaaacatataattaaggaaatagattttaaaactatattccaatatggacaaagagatggtgctaaatggcaaaaagaagctattgccaaattaatttataaagctgggcttgaaactacatcagatagcttacttcctgcaagtggtggacaaaatgcaattgttgctattttagctggtttgtttcaacatggagatagaataggtgtagacccattaacttatcctggaataaagacagcagctaaaatgcttgggattcaactaattccaattaaacaagaagataatgagattagtgaagaaggactattatatgcttgtaaaaatgaaaatattaaaggtctatacataataccagattatcaaaatccaactacacatataatgtcacaaaatggacgaaaaatgattgcaaatattgcatctaaatacaatttaattgttattgaggatgctattcatagtttacttaatgaaacacatttaaatccagtggcttcctatctgcccaatcaaacaatttatattacgagtttatcaaaaattattgcacctagtttacggctagcatatatctctacacctaaacagtatcgagaggcattatcaagcgcattatacaacattaatctatctcaatcttattttttaacagaaattgcttatcgcatgattacatcaggtgaagccgataaattaattaatgcacgccgtaaatctgcaagaagaagaaacaagattattaatcaatatttatctggatataatcttttgggaaatgaagaatgtatatttagatggttgattctacctgatggaataatggcagaaaaatttgagatacaagcacttaaagaaggtgtacaggtctatgcttctgaacgttttgctgttggaaaagaaaaaccaatttctgcaataagaatagctgtatgtgctacagaaagcacagaagaacttaaagctggtctgagcgtattaaaaagactattagaagagaaaaaataattgtattgcacacaatattttaattgtgtgtatttttttttgttgttaaaataaaattacaccagatagtaattaacttatagagattaatatgtattattacatcataataacaaatagataaaatttaataaccgtttaagattatttatttgttgtatagtattttatatattaatccaaatttatttttaattataattgcaattatacaattaatctatttttctgttttactaatactttaatacatttaatacaaaaggagtgatttattgtggaaagaactcaacaattaaaagaaagctttattgcttcaattcctatattcttaggttatatacctataggtatagtaggaggaatactattacaaaaatctggtctttcaccttttcaaatagcactaatggtaactttagtatttggaggaagttctcaattcattgcagcttcaatgatttctactggtgcaagtgtaacatctattgttttgactacatttatagttaacttaagacattttctaatgagttctaatttgaacatgtacataaaaaataaaagtccaaaatttatattgccattttgtcatactataacagatgaaacttttgcagttaattatgaaaaatttactgctggaaattggtctgatagaaatgctatttatcttaatttcttctgcttaatttcatcagttttagctaattttattggagcatttttaggagaaagtatatctatagacagttctatttctggcttcatattgacttctatgtttatagctttaatagtttctcaaataaaaaataagatttatattgtagtatttatatcatcaatcattatttctgttattttatatgcattattcaaaagcaatttagtaataatagttgcatcaattttagcatctttaattggtttctttatagaagaatcttactgtaaaaaggaggaatcttatgaataataattatatattttttattataattggaatgtacattgttacatatctaccaagagtgcttcctatgttaattttttcaaaaaaagagatgcctgattttttgaaaaaaatcatgaaatttatacctgtagcaatacttacttccttaactgctaaagatgtattttttaatggagatagtctatatttatctatagctaaccctaaaattatatcttttatgattgtacttcttgttgcatataagtttaaatctattggtatttctattattacaggagtgatatctatatatttatttggaattatcttgtgatatttggataatgttttattgtataagttattttaaaactatgtgtacaattttaatttaagttgttatattattgattttaaataaaaaacagagtgacttaaagttactctgtttttactcttcattctctactgtaaatattctaatatattataataaaagctttcgacagtaaaaaaaatatatatacttaaatactatctcattccatatttgttatttcttcttcatatttttgaaactctaaatttgctttaaataaatctccatctatttctatataaaattttccaccttgtaaagctactaaatctcttgcaatagcaagccctaatccacttccttcagtattccttgattcatcagctcttttaaatctttccataatctcacttgggtcaaaatttaattcataagaagatatatttttcatagttacctttacattttcaccatagtcatatacatcaatatagactctagtttcttctaaggaatattttgctatattagataaaagattttcaaatactctatacattcttcttccatctgcccatatatacaccttatcatttggaacatttaattttaaatataaattatttttagataatttttcttcaagttcacctatgctttgtcttaatagttgcactaaatcaatcttgctaatttgtaattctatattgccactacttactctactcgcttcaaataaatcttctatcaataattttagtctttttgactttgactcaagtacctttatataatcatttatatactctggttgtattgattcttcttttttaattaaatctacataatttattatagaagtaagtggagttttcaaatcatgagatacatttgttataagatcagacttcattctttcactttttacttgctcttctatagctctatcaagaccttctccaatattatttatattttcagctaaagacgtaaaattatcattcccagtaatttttatcttataatctaattctcccttttttattctttctgtaccttctattacgtaactaagatatgaaagtcttttagttatatatattgtaaatcctaaaaaaatacatatagaaaacagtaatcccatacctatacttcgagtgctaattaccatgattaaagctaaagatattatcactataacaataactttccttgctaaagatactttctttatagcgttactgacctcccttacagtttttattaaccataaaatcactcttactataatacttgtcttaaatatacacattttattttctaaataactcaattgcacatttataaaaaatatattatttgatactatcagtaaagataaagaaactaatacaattacatcaatatgataagatacagcaagagcatacatagttaaaattgcaattgaaataaatactagtattacattaaattccataggtatcttactgtatattagtaaaaatacattatttctttttaaaacttcaccttttattctgctatataaaatgatagataataaacacacaattgctaaacttaaacaagctacaaaaaataatcttactttttctgtagcttgtttaaatatttgaaaattagtgtatactattccatcttctatagttggctcttctggaaaagagacatatgcctcaaaggcttcatctactccatttagttccatactcagattattcagttcaaatttttctccatttattgttttaatatacgagctctttcctacattatttattatctctatattacaatagctcttagttttttgtttaaaatcatctaaattaccatatgatgtatttgtataaaatactcctgtatatgtattaataacatacacttttatattttttagataacttaaatattcttcagaagcttgtttattaatcatgattttatcatactcagaatcattactacttaaatctatacttttactttttgtttggagtttacttttttcttcactagttaactgactatccacagatatcttaaaattagataataagctttccactgttccttcatcaaatatattactatcataaaaatcattagatatattaaaaatcccactctttgtagaagttttttgtatattgtatttaggctcagcaagtcctattgtagccaacaatatagttaatggaaatgagatagatattatgattaatgaaactaattttaatgctctatatttttccaagttgcccacctcatctacattgtcagtattttatataaaataaagtttaagaaaagcataatccccatagagtaaattaaactctcagagaaaaaattaaaacatattaaaattcctaacatttgtgtaaatgtaaaaatgactaaaatcaaaatgcaattaaatattaaactcttttcttttataatttttccactaaaatttttcaatcttataaccaactccccacaccacctttaaaaatcttggttcttttggatttatttcaatcttttctcttattcgtctgatatgtactgctactgtattttctgaattaaaactttcctcattccatactttttcgtatatctcatctattgagaaaactcgtcctttattttctaaaagaagttcaattattttatactcaattggggtcatttttatgttttcaccatcaattttaacttcttttgttagtgtatttaactccaaagctccactttttaaaatttctttacatgtatcttcataattacctaaagttacatatcgtcttaagtttgatttaaccctagctataagctctaatagattaaatggctttgttatataatcatcagctccaatatttaatcctattattttatctgtatcttcactttttgctgaaattaaaattattggaatatttctttcttctcgtatttttacagttgctttgattccatctaatttaggcatcattatatccattagtattagatgaatgtcattctctgttattatttccaaagctttcattccatcatatgctttatatattttaaatccttctgatttaagatatatttctattgaatcaacaatttctttatcatcgtctactactaatatattgtacatattttcacttcctctattgtataataatacttatctatattatacaatatctttcacttactttctcaacaatgactaaattgttatattactttggcttacatttttgtaactttcccttataactatataataaaatataaatcttaagaaaatattatcctaattcttaaatatttcttaagatttaagataaattgagatttatttgaataaattgatttgaattatgttattttcagattacttttatttaagtattttgattggattcagctgaattaatgtatattaattcttattgaacagtttttatttttggggtggaagaatggtggaagaattacatttcactaattttcttccaccattcttccacccaaatatacttagaaacatttatttcactgcaataatagctacttatttaaattctatttttatacattctatctactatatactgtacatattctattaaaatttatataaataaaatacaaacttatttcatttttttaacatgttcagaataataaacaaaatgaatgtagaaaaagttataatttcataccttcattttatttattatgtatctagctgtcattttcttattttaaattcttaaaatattcttctaataaatttaaaatatcaccatctacttcatcatccttactacatagtgctgacattaaacttaatattgaatttttatgtgtattctttaaaaattcttttgtttaaaatctctgatattatttttcttttactaatacattatagtgtgtacgcttatctattttctccgtttctaaaaactctcttctttagtaatctttttaatactgtaaatatagttgtatctttccattcatatttttgttccatagacttggtgatttctcttgatattaataccttttctgattcccaaatatatctcataacttttaattccgcttctggtaatttactaattttcatagtatacatccctttaccaatttatgtatatgttaaattctatatcaataaagttttacaaacaaaagaattaaggtaaataattacattcgatttttactatatcattcttttaaatttctataatactcatctaataggtctaacttctctttacttacatttttatgtgtagtggtaagtgaacgcattatttttatgcttttactagattttagtacctttttcttaaaagtataatattctttattatctattattattttataatgatattgaaaatttataatatatctagccaaataccttttagcaactagcctttttagtagtatttttattgtacttttatgccatccataaatctgttttatttcttttacaatttcttttttaggcattagagtgtcttttttacataaatactccattactattaattctgctcttaataatttttctattaatatttcttctttcaatttatgtcacttccttaattcttctaacttaaattaataataggagctttttaagacaaaaactagaggtaagttttaccaaatattctacatatttagtctgtttttttaaacgtaaaataatattcatatatatatatttgtttaatttgcaaacaatgctaccaaacaataaatagctctattgtattattttagttgtagaatagcactaaatcgttagaatcaaagaaatttagtagcacaaaactatataggctaatgcttataaaataaattataagttatgttaacaagttactaaaagcatattttatttttgtttttatgaaagttttttaggtatgtaataatatatatcttttaaaaatatgtattcatgtatacatattttgacttattatactgataattcatataattattttgattttatagatacacagttagatgattttataatagagcataaaaaaaatgtagtataatcttgtttatatcaagttatggtattggtaagtaagtataattaaatagacattattttctgggtcctctttttattttcatctgcttttaaataatattattgacattgatatgactgtagttttctttattttaatccattgcttatatcttttctaacaagaaatgtcattttaaatcatttctataaattgtaaaataatagtatatttgtcatagaaagtgatttttttgtctatatatggtaaaatatagaaagtagaaatcaacaaaataaaaatttatatattattaattttatatggaggggaaataaatgaaaaataaaaaaggatttactctagtggaattattagtagtaattgctataataggaatattggcaataatagcacttccagcattatttaaaaatatagaaaaagcaaagatagctaaacttgaagctgatataagtgcaataaaaagtgcatctcttagttactatgctgatgaatccaagtatactgatggaggaatgatatcatgggtaaagaaagatggaaaaataataataaatgggggttttaaagatgacccattagcagataaaatagaaaatttagggatgccttataatggttcatatctgttaatgtcatctcctggtcatgaaaaatatctagaattaagcatacttccagaaggagaaataagcaaaagtggtctagataaattaaaaaatgattatggaaatttaatagacataacgaacgatcaaaataaaataaatattgtaataaaacttttaaataataaatcgaatacttaaatacaataaatttgatttaataattactgatgaaataaacaatcttgtttggagaaatgaaaaaagcactccccaagaatagaatgcttagttataactacagaagtgtattggcatacacttctattttttattatatcacataatttatgttgctaaaaatacctatttaagttgtttttaaattgtgttgagtaatattcttgatagtttatacattaatgaatttcaaaaaaataagcactctttataataaaaagtactttagtgtatgttaatgtcctatctaataaaattgtaacatgtcttatgctttagtatgataattttcattctctttattgttgcaacttatactatagttttgctaatttatctgcaaacacaacttctttattgcatgtgtatcaaccaaaaacatcagaatacttacttaatacatctgcaaaatcgtatctttcatctatagtattcttatttgacaatataacaaaaaatgaatcgagatatgccttttttataattagatatattttataaattctagcatatcatttgttattttctgatatgctattgatgttttaaatcttctatttattttattattttttacttttccaattgtacctttataggagttatatttatgtgatttatgaaaaaatgctatgcatttaagttctaattttttgataatacatctaactttcttttgattaataatgataccactatttttaatgtggcttccctgaggcacacatcttttttaaaaactcaagctcatcttttaaaaatttattttcatattctaattcttgttctcttgttaatttattttttctttagtgtttttgtttttattcattatggtcttcctttcattttgaaaaaggcatcaacaccactatgtaaaaatttttgttttcatgttgctataactgtgctattgtttattccaaaatacttagcgatttattgtacactatacttagttatcatcatatagtttataacatctaacttgaaccatatagtatagaaaacttttttatttttagtgcaccctctcctaatatattaacccatctttcaacttgagaatggtcataaactccatattgttttactattaaaatatctcttccttctctattcaaataaaatttagctacttttaatttgaaattaaaatcatatttagtcatacataaacatctcaagcgttagatttttactctaacaattatggtgcagtacaaatattgtataatactgattttctattgacaaaagaatataaaagagatatatttgtattataaagatacaaatatatctcttttaaaattactaaggaggataaaaaatgattcaaaaaaaaatttttatgggtttttgtggtttccttggatttttaagtcttagatatttttcatctggcaatgttactgatcttacatatattggattttttgcttttttctcaaactttattatagcaaaaataaatggtgataaagcagatgaaaggtatgtacaagatgaaaaagcagctatggcatttacaggacagcttgctattatagaattattcattttatggtgtattactatagtgtctaggaatgtagaattaatgtgtgttttactatcaattacatatgcaatcactttaaatgtttatgctataaaactttatattttagaggaaaaataatatgcccaaattcatttgtaacctaaaaaaatatagacaattaaaagaattaactcaagaacaattagcagaaaaagtaggagttagaagagaaaccattatgcgtttagaagcaggaaagtataatccttctttgaaattagcaatagatatatcaaaaatagtagatacacctattgatgaattgtttatttttgattagtttttgcattattaaaaatgtgttttaaatacaaacttaaattcaatctttaagtcactcctgactgaactatacccactgttttatacagttaaaacatgtaaaagtggttataaagtactagtgtcaatcattagtactttttttattatattcatataattaatagctatattttaaagtttactatctaaaaaatagcacgtcaaataaaaccctagatatttaaatttttttagagctacttaaaataaattatgctatctctgtacttaaatatttcctaaattcaagtggagacatagaatttaatctcttttgatatctaaaattattatagtaatatatataatcatctattgctttgactaattgttcgtatgtatcaaatttccttaaatagtacatttccacttttaaaattcccaaaaatccttccataggagcattgtcaatacaatgaccaactctcgacatactttgtatcatgccttgtgttaaaagttttgatttaaacaccctgctagtatactgatagcctctatcactatgaaagataggttttgcatttggatatacttctattgctttattaaaagtttcgaatactaagttattgttatttgattttccaataacatatgaaactatgcttctatcacctaaatccagaattgcacttaaataagcctttgtcccgttggttaatttaaattcagttacatctgttaaccatttttgagaagttttatctgcactaaattttctatttaatacattttcagcaattacttctggtgtacatttaacataactaaatttcttttttctacaaatagaccttaagcctacggctctcattagtctgtaaactctcttgtgattgacattaagtttatactctctgtttaactgcaaggtcatccttaaagagcaaaaaactcccttcttttcttcatatatattagttatcaaagttgctaatttaatgttttcaagttctaaattacttttatctcgattgagccatttatagtatccagaacgatttactttagcgatttcacataattgcataagcgaagcttttttttcattgaataaggattgaatagctttatatttattttcattcttggatagtgtaattaccaccctctttctatgttttttaacttttttaagaatgcattctccagttgtaatttgtgtttttctgcttttacaattttcaattccaactttatttcatctaattgagttaactcatcttctttttttgctttacctcttcggtcttctaaaccaactataccattttctttatatttaagagtccatcttctaacttggctgtatgaaacaaagtatttttttgctattaaattgtaattaaaatcatgctcaatacaatctttaacaatttcaaccctttcatctaatgttgtttttctagtctccataaagagtcctcccttcggggtttcttttatctccttatgaagattatactccttaacccaagcttttagtggattaacagacctcattttatatttttttgagatagtgtcataagatccttccccatttagataagattctatagcatttaatttaaactctttagaatagcatgatttgtgactttgttttattaaaccatcatttccaaaagtttcataatttcgcatccactctctgaatgtacgttttccaatatttaattcttccattatttttattactgaattttcaccctttaaatatgattcaattgcttcgattttttgctctgatgatactttagttttagacataacaaaaccctcctagttttagacagttttacatatttcaactgtctcctaagaggggtatagttcagacagaggggctttttattttttcaaataatttaacgttcatatataaatttattaatttttcagctagatatgttgaataatagctaattctattgtattattaatctgtagaataaaactaaatcggcaaaactagagaaatttagtgacgcaaagctatagggactaacgcttataaaataagttatgtcagccagttgccaaaaagatattttctttttgtttttcatgaaagttttttagggggataaatacattatgtttagagataaaatggataaatgtacacatatgctaactgcttatattggtagttcatatgattattgtgattttatagatacacagttagatgattttatattagagtacggagaaaaagttgtggaatcttgcttgcatcaagtgatggtattggtaagtaagtataattagacagattttcttctagaaaaccctttttagttttatctacatttacattaatatattggtaatataaaatgtttaaatttattttcatattaagaataaataaaaatgttaactaaaaattataattaaatagacatttatgttaatctatgatataatagtatttgtggtaatacacaagtaaatcaagtatatcttgatataggttaataggagtatttttaatgaataatggaatagtaaaatggtttaataatgaaaaaggatttggatttatatcaatggaaagtggagatgacgtatttgctcatttctcagctatacaaacttcaggatttaaatcattagaagaaggtcaaaaagtaagctttgatatagttaaaggcgctagaggtcctcaagcagaaaatataactatattataatatatagatttttcggaaagactcttttaagagtcttttttttatttacgcattttgtaaaaaaggaaaaaataacttcaacaagaaaatacttaaaaataatacttagtctaaatactttttataaaataaatctgacaaaaatatatttataaagtatgtacttaaacctacaagtactcttttaattagaatatatagtaatataataattttagttgtggcacatcaaaattttcaactatctcataaatacatactctttcttttgtattcaattctgatataacacttttagtaatttgttaataaaaagcaattaaaacatatctatatgtttcaatgttctattttttcactgaaatataataaatataaaattagttaaaaagtaaaaaatctacaataagttaatttgatttaagtttttaaatttaaaatactttaaagtattaataaaaattaaaaataaaataactacctatggaaatgacattataaatagattttttcttaactatacataataaaacataacaaaacattataaaacataacaaaaacttagacatcgttttcttagtatgatatactaaaaaagaatttacactaatttactaagggggaatatcttatgtttaaaaaactttcagtactagctttagctatgattatttcattaagtattactgcatgtaattctaaagaaaacaaagctaatgatgaatctaatactaaagtgacaacagctgatgattcaaaagaaaaagagactctttttgtctattcaggggcaggtttaaagaaaccaatggatgaaatagcaaaaaaatttgagaaagaaaataatgtcaaagttgaatatagctatgcaggttctgcacagctaatagctcaaattgagacaagtcacaaaggagacgtatttattgttggttctgaaccaatttattcaaaggcctttgaaaaagaacttgtaggtgaacataaaacggttgcacatcatacacctgcaatagttgtacctaaaggaaatccagctaatattcaaaaattggaagacttaaataaagatggagttaaacttattttgggagacaaagagtctaatgctataggtaagactacacaaaaaatacttgaaaaaaataatttaaaatctataaatgataatgttgtctctacagctgcaactgtaaatgaaatgattgtacagttaacatcaagtaaagctgatgctacaatagccacaaaagattcggtctttggcaatgaagatgtagaagttatagaaattgcccaagataaaaatatagaccaactcatatcagcaggaatcgtaaactatagtgataaaaaagatttagctaataaatttataaattatatagagtcagatgaagctaaacagatatttaaaaaatatggttttgaacctgttaagtagtgattaaacttgaaaaataaattttttactacactacttactggattttttgctatagtctttttttttattgtatcaccacttcttatgttaatcattaaagggataagttatgttcctatatgcttaaaatccgtggaagtacagtatgcaataacacttagtattaaaacatctttaatatctactatagtatgccttttattagctattccagtagcatattttttacatattactaaattaccatttaaaaaactgattatacagataataaatctccctatgtctcttccacacttagtatcaggaattgctcttttacttttgtttggaagaatggggattggagattccatttataagatttttaagcttgattttatatttacaaagcaaggtatagttttagcacaagtatttgtaaatcttccacttactattaaaatacttcacacttcactaaatgaaagtaatgaaaagatgatatttgttgcacgtacccttggatgtaatagttgggaagcatttagatttataattcttccaaatctaaaaactggaatcatatctgcaactgtaatgacttggtcaagagcacttggtgaatttggtgcagtagctatgatagcaggttctacacgtatgaaaactgaaattattcctacatctatatatttaaatatgtctactggtgatatagacattgcaatcggaatagctgtaattttgatatttatctcacttacatgcttgatgctttttgagatattttttaatagagaggttgataagaattaatatgttaaaaataaaaaatttatctcttgatttacctaattttaaattacaagaaaatagtttaaatattaataatcatgaatactttgttttattaggagctagtgggtcaggtaaaactctattcctagaaacattagcaggaagatatccatctgctaaaggaaatgtatcatacaaagaaaatttaatatcaaacttacctccagaaaatagaaatataggatttgtatatcaaaattttgaattatttccaaatatgaatgttgaagataatataaggtttccacttaaattaagaaaaatacctatagatgaacagattcttaaggctaaccacttgtctaaattaatgcagatagaagatataaaaaataggtatcctaaaaatttaagtggaggcgaaaagcaacgagttgcttttgcacgtgccttaatagctgaacctgatatattacttttagatgaacctatgagttcattggattatattacaaaaaaacatataagcaaaattttgaaggatgtctacataaaatacaaaccaacagtgattcatgttactcatgatatttctgaagcaatgttttttgctcataagataggaataatgaacaatggaaaaataaatcatatttttgatttaaatgaagaaataaaaaataaaggagaatcttttttctatgaatatatttgatattttgagagattatctattagtacaagtcgataaatataatttaaatatggatatgataagtattgtgtccaaatctctatcttcaaaagaagcaattggaaatactaagcgtaaagatttcccaattatagttggtaaagaaataatgcttgaagctgactttaaaggagctaaaggacaagcatttacttctactccatctacatttgaaggttctttaaaagacatattatcattagatttacatgacaatcctcatgatagaagtctttttatagcatcattaaatgcagttatgaaatacttaggcaagacggatagaaccattcattgtaaaaataacgagccagaggtatgtgcaaaaaaattccctgagtttataaaaatggaatttggtaatccaaaagtagcaattataggatatcaaccagccataattgataatattaaggactttttcgaaacaagagtattagatttaaatcctgaatttgtggatactattcaatataatgttaagattgaagatggtatacgagattatgaagatgtaatatcttgggctgatttagtgatttgcacaggaagtacattatgtaataactcaattataaattttctatcacttaacaaaccagtttactattatggaactacgatagctggtgcatcaaatattttaggtttaaaaagactctgtttttgtagtaaataagcaatcatatcatcaaggagtacacaaatatatatgtgtactctttaaatttaaaaagttattacttttattctaagtactaaagtaaaattctattaaaatgaatcccgaataaatgtacaatccctttaaatctcaattcctatcaattattaatattttgattagtcttatacataaatgttttctttattttaaactaataaaaaaaattttattccattaatctactctatatttttcagcatttaagaaataatttttagtactttgtttgataatataactaagacaacttttcaggagatgattaaatgacatttaagaataaaaaatttactataaataaatatgaaattctatctattattctagttttatgcttgattttaaccggttttagtagctatgtgaattatagtcataaaaaatttaaagattatgttgtcttctatgttcagcatcaagatgatgaagtgttgtgggctgggagtgctattgttaatgctataaaagaaagaggaaaaaatcatgtatttgtagttttagtatctactggatgtggtatatccgtctttgataaatataaaaaatatgaaaacctaacaaatatacaaaaatcagaatatagaaatagagaatttttagcttctcttaatagccttggtgtaataagggaaaatataatattattaccagaaacaaatacaaatggtaatactgacttcaattacatggaaaaaattgctcttacatttgaagaaaaatttaaaaatgtaactcatatagcacatacttataagttagatgaccatttacaacatttaaaaaatggttctgttatccaaaatttatataatgttggtaaaataaaagatgctaaatattttgtaaaacctaaatttgctgataaaataacttttaataataagatagtttataaagctcattctactgaagactatgaaaaggttaaaaatgcctgtcaacaatacaaaattgttgatgaattagaatatagagaaggtattggctataagtctgaccataaatcatttgataagttattaaataataaagatgttcctgctatacttcatacacctaatttataagaaatatttattcttttaatttaagttataagaaggaaattatttgagattttgtgatatagcactttttgtgctatactactttttctcattcaactattacccatatctaatttcatcatctcttaaaatatataaagatatcatcattaaaacctataagccttattaaatactttatacatatctacattaaactacctatttatattaaactacattaaaataaatatttgttataaattcttaataattatgaaactcatttgttatttatatttgttaatatatgtttaaacctaaaaaattaataaacccaaaataacataaggagtgtgatagattaccctagatattttcataaacttttaccttcagattaatatgggcgtctatacttttaaatttactatatgcattgacaatatattaaaagtactagtttttatttcataatgaacgggcttactgttttctaatacctctttttggtataaaataaaaattggttaaaaataaaatttcaagggggttaataaattgaatcaaaatatattggttgtagatgatgatagagagatagttgatgctatagagttctatttgagacctgataactttaatgttttaaaggcatatgatggacttgaagcattggacatactaatcgaaaatgatattaagttaataataatggatgtaatgatgcccaatttagatgggcttaaaactacacttaaaataagagaaaaaaggaatataccaataattctcttatctgcaaaatcagaagatatggacaaaattataggtcttaatatgggtgctgatgactatataactaaaccatttaatccactagaacttactgctcgagtaaaatctcaacttagaaggtatataaatttaggtgattttagtaatacaaataactcaaatgatactaattatattctaaaaagtggtggcctagagctaaatacagatacaaaaatagtttctttagatggtgaggaaattaaaatgacaccacttgaatataaaatacttacacttcttatgtcacgaaaaggtaaaattttctcttcccgtgaaatttatgaaaatgtctggaatgaagatgcttatagttgtgagagaactattgctgttcatattagaagaattagagaaaaaattgaaattaatccaaaagaaccaaaatatttaaaggtggtgtggggcattggttacaaaattgaaaaacttaattattaatgattctaaagcaaaatttattttattattattactgtttctattagtttctatattatttgaagcagtttatgatttgaataataacttttcttataatattaattgttattataaagagtttgctctcccttatttttattttttcggtactcctgtacatttgtcaaaagtagaattagagtttgtctgcataggtattatattatcaagttttttattgactatactatgttttacattgtataaaaaaaataaacagactaaagtcaaattcttagagaatgtcataagccttttttctaaggtaaaaatagaacttacacttatattaactttgatactattaaccttaaggtttcatgcatttacaagtaataaaatgttttacaacactaatttaataatctacaattttataattatatctatagtctatataatatatgaaaatattaaatataataactataatctaaaagatatgtctataacatatgtattcttttcaaacttacttagtatgtataataaaaaaactataaataaaaaattagctatagtatttttaatatctatagttgtacaagctattatccaatatcttgttttgatattctttatgtatatatattattctgaggcaatagctatagtaattttatttacacttgtaaacacagtttttcatttttatatatacaactttttatctgttaagtttaattacataaataacatatcaaaaaatataaaaaatatagaaaatggcaatttaaagtataaattagaagttataggagatgatgaaatatctactttagccaaaagtataaataatataacaggtggtcttgaaactgctgtagatgctaatataaaaaatgaaaggatgaaggcagagcttatcacaaacgtatctcatgacttaaaaactccacttacatctatattaagctatgttgatatgttaaaaaataatgactttgacagagagactataaatgactatataaatattttagataaaaaatcacaaagattaaaattattaatagatgacatatttgaagcatctaagctaagtagtggagatgtagaatttaatataacaaaaaccgatataagagaacttttaattcaaagtattgtagagtttgaagacaaaattcaaaatagcagtttagattttataatagaaacacctgaatatgctgtttttaccatgatagatggtaaaaaaacttggagagtttttgagaatctaatttgcaatatactaaaatactctatgcctaacactagggtctatatagatatgtttataaaggaagaaaatataatattaacgtttaaaaatatttcaaatgataaactaaatctaaagccagaagagttaatagaaagatttagaaggggtgatatatctagaaaaacagatggctctggtcttggtttatcaattgctcaaaatataattgaattagaaaatgcacacatggaaataattatagatgctgatttatttaaggtaatgcttacttttagaagagttaattgatatattaatataaaaatatattttaagttatttaaacaagaaaaaaacctccttagaggtctttttctaaatgttggggtttatatttacatattttttgattatacctttttggtgtgatattaatacattttaaattatatttctctataattcatcacatatttcatctctctgtatctataatatcacatagtgtttccataatcagttacatctctgttacctaagattacaattttgtaatatttgtaatcttaggtacaaatttacatttgttctttaatataaatatattctttctatttaccctaaagaccttttaaatcatatttttctaagaaaagttttaacttagaataaatttgttctgctccaccaattttatttgattcaatatttaaagctagtaatggttcatgtagtgatattctaagtaaaaaccatccatctccatttgattcatcacaattaactcttattccttcaaaattatttggtgctacagaccatccatcaatactcttaacatgagaatctaaatcttttaatatatcctctgcatatggtctaaaatcttctttgttaatgcctattctaacttctttctcttcttgagcttcttcaaggttttctatcaattcttctatagtctttccttccaaggatagctttgctacttttattaaaattttagctattaaatatgccccatcatctaagaaataattttcttttaaagcagcatgtccagacgtttctatagctaaatggcactcttcaccttcactattcaatcttatagcttcatttattacatttttatatcctcttttaaatctatgatgtcttccttgtaattcatttataaatttagcaagtccttcagaagtaatcgaatctgttactatagctgtttttggatgttcttctaatactattgatgatataacagctataagagcatttttatttattggtttgccatttttacctacaatagcagctctgtctacatctgtatcaaagattattcctaggttgctattattatccaacacagctttacatatgctttccattgcttctttgttttcgggattaggtatatgatttgggaacataccatctgggttcaaaaactgactgcctgtcgtatctgctcccagtatgtgtaaaactttttcagcaaagaatccaccagctccatttcctgcatcaaccaatatcttaagcccagaaaaaggcttttcataatttttacttgaatttacaccttttctaattttatctatcaataaattagaataatcttctattaaattttttactataacttcaccttttttatttacttcctcatagtctacactatcatttttaacagctatatccaacatctcttttatattagttttttctaaacctccactttctgtgaaaaactttaaaccattatagtaataaggtaagtgacttgctgtaatcataatcgccccatcagaattgtatccatccataatagttgtcataaacatagctggagttgtagcaatctcacaatcaattacattacaatcatcattagttaaagtttcaataacagtacttctaaattggcttcctgttatcctagaatcagttcctatggcaacagttactttatctttcttagtcttttcttttagccaaatatgaaacgctttagctattttttttacttcttctacagttaggttaacttctttagaatcattttcatacgctattcctctaatatcagtaccattttgtagtttatataggtctcccataaaaaattctccttactcaaccaaaatttttattaaatattataaaatttcttgtttccacctaaatttttactattaaacagaaacatattataattttattacatggttactttatactttcttttagttcttctattttatctttatatgaaattggaggcttatcattaaataaagctgaagtaccaacaacatatatatctacttttttaccattcataagtttaatagtatccttatttatatttccatcaacctctataaatggaggattatcataatcttttagtatctctgtaagtttatccaacttatccaatacagaaagattaaacttttgacctgcaaaccctggatttactgtcattactaagataccctcaactaaacttatatattcttctattttatccacacttgtttgagggcttattgctaacactggccctataccataatttcttaacttttgtatatcagcttttacatttgtacttgattctacatgaaaagaaatatattttggctttatataagacatcatatcaatatatttatctggagtttctgtggctaagtgtatgtctaaaggtattgttgtattttcacttattgattttaataactctggtcccatagccaagtttttaacaaatattccatccataacatcacaatgaagtaattttacacctgcttcttcaagagcttctaattcctcttttaacttcatttggtctgcacacattattgaagcacaaataatagacataacgctcccccttgttataaattatatattatatatatttataaattttctttttctatatcatcaatcatttgtaatcttcttgcatgtctttctccattataacttgaatttaaccattcttcaacaattctcattgctaatcctttcccaataactctttctcctaaacaaagtacatttgtattattgtgttctctagttgccttagctgaaaaacagtcagaaacaacagctgctctgattcctttaaacttatttgctgcaatagacatgcctattcctgttccacaacaaagtatgcctaaatcagattttttactttgaacattttgacttaccttttttgcatatattggaaaatctacactttcttttgaatttgtacccacatcttcaacttctatacctttatttattaaattttcctttatatattcctttaattcataaccaccatggtcacatccaatagatattttcattaaatagcacctctttttataatttttttgattactttcagactattttataattatcataaaaataaagtattgtaaaaataaagctgtcccattgtagaaatttctttctatttttaagacagctttaattgacttatgtcaaatcaatttgttatttagatatatttatatctataacaactcttttatattttttactatatcttctgtagttaaaccatagtgttttaataaatcagctggtgtacctgattgaccaaatacatctttaacaccaattcttctaactactacatctttagtttctgctaaagcttcacatacagctgaacctaaaccacctattatactgtgctcctctgctgtaactacttttccagttttcttagcagtttcttttattaatgcttcatctaatggttttattgtagatatattaacaacttctacatttataccttctttagcaagttcttctgctgcttctaaggcttttgctaccattattcctgtagctattactgttatgtcagaaccttctcttaaaacagttccttttcctatttcaaatttataattttcactgtttacatcaggagttgcagctctacctaatcttatataaacaggtccattataatcaatagatgcaagaatagcttgtcttgcttctaaagcatctgctggatttaatacaaccatatttggtatacctctcattagagatatatcctctatagcttgatggctaccaccatcttcacctactgttacacctgcatgagtagctgctatttttacatttaaatttggatatgctacagagtttcttatttgctcatagcctcttcctgctgcaaatattgcaaaagtactcgcaaaaggtatttttccacaagtagcaagacctgctgctgtaccaatcatgtcaccttctgctatccccatgtcaaaaaatctatctggggcaacttctttaaatgatatactttttgtagcttttcctaaatctgcatctaatactactatatctttattttctgcaagttcttttaacacttgtccgtaagcttctctagttgctattcccattcctatagacctccttctaaatctttcaatgcttgctctgcttgttctgcatttggagctgttccatgccatgcagcattattttccataaatgaaacacctttaccttttactgttttagctattattacagttggttttcctgtaacttttttagcttcatcaactgcatttcctatttcttcaaaagaatgtccatttattactattacattccatccaaaagatttgaatttgtcatctactggatttacattcattacttcttcattagaaccatctatttgtaatccatttaagtcaacaaatgcaattaaattatctaatttgtaatgtgatgctgtcattgcagcttcccatatttgaccttcttggatttctccatcacctaatatagtatatactgtatagtctttgttatctaattttcctgcaagtgccataccatttgctgcagatagcccttgaccaagagaaccagtagacatatcgattcctgctacttttttcatgtctgggtgaccttgtaacttagaaccaaattttcttagtgttattaattcttcttctgggaaaaatcctttttctgctaatgtagcatataaagctggtgctgcatgaccttttgatagaacaaatctatctctatcagccatttttggattttctgcacatacgttcatcttatcaaaatataatactgtcaacatatcagctattgataatgaaccacctggatgtccgcttttagcttctgcaaccatttttattatgttttttctaatattattagaatgatctctaagagtgctcatactttcttcctcctgttattttttaagaccttacatttttttatcctacagtagattttacaattttttttaaaataatacaaatgtttttttaagattttactgctacttttatttcttccccgttcattaaagctgtaataccttctttaaattcgtctaaaccaacagttctagtaactaaagcttctgtatttactttcccacttgccattaaatctaatgctgtaatccaagaacttggcttttgagatctacttcctatatattgtaactctctttggattattgcttcttggtccatttcatttaattttttagcaaagattccaacttgtacgaaagtacctttttttctaagcagtcttaaggcttcgttaactgctggcataaacccagaacaatcaaatcctttgtttactccatttccatcagtcatttcattcactacatctgccaaactttcttccattacatttacagttctatctactccaagatttttagctatttctaatctttccttatcttttgtaacaccagacattataactgtagcaccttgagatttaacaacttgagctaataataaaccaattggccctggtcctattattaaaactgtatcagaactttctatagtagtcttttcaagagctgcatgaacacaacaagctagtggctctgtaagggctgctgataataaagatacattttcaggaagtacatgtatgctttcttctcttgatagtacatactcagcaaaacttccatttacttgagtaccaataccttttctagttgggcataagttataatctttagtttcacaatatatacatttctcacaagttgcaaaagtagtttctgatgtaactctatctcctacttttatatctttaacatcttctcctacttctacaacaattccagaaaattcatgacctaatgttactggggcttttatatttgcatattcacctttaaatgaatgtatatctgaaccacatataccactatattctacttttattttaaccttgtctcctgtagcttttggttcttctacttctaaaacttctacattatcatagcctggtttagttttaactactgctttcattatttttcaaccccttgtggtaaaattaatattttgttaaattcttcttttctatctcttatcatttcaaatgctttgtaagtatcttcaagtgagaatctatgagataccatttcttttaattttatctttccttcattaactagattgattcccttagtccattcttgtcctggaaatggtgcagaataagagttccaaaaaccttttaattctagttcttttctaaatatattttcaaatgcttcttctgataaagttatatctgaatatgctatccctaaaaatcctatcttacttttctttttagttataagtaaacattgttcttgagttatttttgaacctgcacattcaagagctatgtcaacgccttttccaccagtaagttcttttattttttctactgggtcaatatctttagcattgattattatatcagcccctaattcctttgattctcttaatttattatcagatatatcaactgctataattgttcctgctcctgctattttaagtccttgtattaccaactgccccattgttccactacccattacggctacagcgtctccaacttgaacacctatattaagtactccatgcatagcaactgctagtggctctatcattgcagcatcttcaaagtccatatctcctattggaagtacatttgtagcttttatatttacatactctgcaaaagctccaaaacttttagctcctaacattccatggtcatcacacaatgaaaataatcctcttttacaatattcacattcattacaaggtataaaaggaattgcaactactctatctccaacttttacattttttacatccttaccaacttcagcaattactccagaaaactcatgtcctggtatagctggaactggatatttccaatgttttaatactcttggaggatctgacccacatattcctgctgccataacttttatttttacttcatcactttcacatggttttatttctatatcttcaaatctcatatcatttgtgccatgtaatactgctgctttcacgataaatctcctcctcttgtattttgtatttttaaaaatttataaaaaatattactcttttttagtagctgctaaatgttaaattttcgcatactttactaaaaaagagtaatctctattaactacatattagaatattccaaatgaagaaactaattgagataatttcaatattccccattttagcaagtttccacctgtatctatacttgtaaccattgttgttccttctggcatcatatttgcttgttgtaataattgtgtatgaacatctgcaaagtttgtagccatataaagtgatatagctattactattgttcctgttataactgattgaactatattaccttttctaaagcacactataaatgccatataaaatggtattgtcgctaagtctccaaatggtaaaactttgtttcctggtagtataactgctaagaacaacgttataggaacaagtataagagctgttgatataactgctggatgtcccgttgctactgctgcatccagacctatataaagttctctgtctccatattttgcttgtaagaaatctcttattgattctgaaattggaattaaaccttccattaatattctaaccattctaggcataagtaacattactgcacccattgatatacctacattgaatattcctgctacatcatatcccgcaagtgctccaagtattatacctagtataatccccatcatcattggttctccaaatataccaaatcttttttgtatagagtctgggtctgcttgtattttatttattcctggtattttttcaacaaatttacctactaaatatccaagtggagcaaatgaagctgttgaaccagttggtaatgctataccttctaaatcataaaactcctgaacattttttgctgtcttttctgcaataaacagtactaataactccattagtattgcacagaatatagcccaaacataacttcctgttactatatatccaactgcacctgctactataaagtgccaataattccatatatcaacgtttaatatctttgttttattgaagtataataatagtaagtttactaataaacaaactggtattaatattggtgcaactggtgaagcccatgttgctgatgctgttgttggccaaccaacatctattactgttaaattaagtccgaatctttcaaccattccttgagccgctggccctagtgttgatgttaataggtttacaactaagtttatacccacaaatcctataccaattgtaagacctgactttaaagcttttgtaaacttaattctaaatatcattcctagtactacaattgttattggtagtattactgtcggtcccatatttaaaatgtattgtactactgctaataatttatccatttataaatcctcctttttctgttttataaaatattatttcaatgtatctatgataggattattttaaagcatctaatatttttttatctaatgctgctgtatttactccagttatatatgctgttgcttttattgctggtatattataagttgttggtagtatagttgttgatactattaaatctgctccttcttgctttgttgcacattcagctattttgcattgtataacttctgcttgtatattattttccttaactaatctctctaccttgtcacaaactactgttgatgttgctattcctgctccacatgctactaatatttttttcatttttatttcctcctaataatttttatttttatattttttatttttagtacttttttatttttataaagactttagtgtccttaaaacttcttctttatcagtagaactcatcaacttatcaactaactctttattttgcataattcccattaattctgttaatacagataattgactgtgtggttgattaagtcctaatatgaaagccaaatttacaggtactttttcatcttggtcttccatagaactaaatactactggttcattaaaagtacagactgatataaattgctctttaatatattctgcatctgtatgtggtattgctactccataatcacctaaatttaaacctgttggaaatacattttctcttgctaatattttttctccaaattcttcttttacaaagcctaaatcaaaaactttattatgtatttctttaaagaaatcttctttcgttttacaatccattttaaggtctataactttatcacttacaaaatttataaactccatatttacacctcctaattgcctttgtcttataccttagtttttcttgactttatataaagcatgttgcgtgccaaaaagtggctttttttgtgaaacaaaagaaaatgttttcccgaaaataatgctctcttccaggattttagctgactttcattgataaattttttttgatttttattttaatttttacttgttaatcacttaactagccatacttttttatattttttgtggttttttttgttagagaaatgatttttttgttttttacaaatggttttttatgtttaacaactattttataaaattatttattatgaatttaatttatttttatatattttttatatattctatattttataagaaatataggaaaaattttcatagaattgtccaataaaatttactttttacataaataaattcatatattttatttaccaagaaaaaagctaattctataaaatcatataaataaatttcatagaactagccttatatagagtaattaactacttagcaattgagtaattttaaattttatactaaagcaaatttttttgtctttcttctcggtactaataattagcttaaaagttcttttatttcatttttatcttcagtatttaataaaacttctaaagtatgctggtcattaatctttgaaaataagcttcgtatttctttcttattattttctttaagtgccagtagtaccaccaaatccaccataaatttattgtcccatactataggtttattcaaccttgcgattgctattgcaggctttataacgttttctggaagtccatgtggcacggctaccttagaggccattacaacacttcccattgcttctcttttatatacacttaatatatactttgaatcaacatatccaccttcttcaagttttgaaacaagagtatcaattatatactcctttgaaattccttcaaaattgtataaaatcaaatcttcatgtattaaattattcaactggttttcaatatttaaagctggttgtttactatttagatgctctaatactttattaataccatttttaccaagtacctcattataagaaataaaaggcacgtttttataatctatatcaatagttccacagatagcaataatattatattcagcttcaatatcatttaactcttcttctaaattattatttaaaaaagcaactggctttacttcaattaaagtgccatattccttaatttgtttttctatatgctcttttaaatttaaagctgtacctacaccactcaaacataaagtaatgattacatttttctttccatactcgttttttctgtaactaaatttatttgtatttatcatagcataattcttatttttctttaaatcagctattataccatctaaactttttccttcaatggttgcaagttttcctgcttccattgccaataatgtatctactctatttacagttttacatctaattccaagccttttttcaacctcatcaccaagaattaccaaagaacccatatcaattagaactagaataccttttctagcttctatcttttgaagctcttctaatacatgctctatcccctctgatggtgaatctgtaagtgctatttctatacctagtgtacattctatacctaaaatatgatttacaactttagacatttcaattccaactttaccatgcgtaactattactactttaactttatcttttatactttcctcattataacaaaatttatttatataataagccaaatatccaagctcatcttctggaaatgttacttgtgtcaaatcttctactatacccattatatatcttgacaactcatattccattggcattgatgcttttattttatctaaactcggatttattatagtttttccatcttttatcctacctatagcatgctcaatatgaattgctagagccaagtacagaccttgatttacatgcttaaactgctccttaataaatacaattaccttatccattatctccagtgtagactcttttaattgtcctccccagtctattcgacttcttctatcagataaatttttattgtttttaatagcattaaacttcttatctaacttttctataaatgcattttttaactcttcttctgaaaagcacttactttccaaaaccttaagctctttttctgcataattatatatctcgcttatctcattatcagataaaattctattttttccactcaccaattcactaatatctatatatatatcctcaactgaaaactcagaatacttttcatttttacaattacaatcataatatccactttttatataatcccttaaactatctaaatctataattaccttatcgctagaaaatatcgatttactaaaagctctagcacaagttacttgtatatcactctttaactgacctatatttccagtacacttataattcataagtgcacacataacttctttagttattataaaattcttgtttactcgctttgcttctctttcaaaaaactttattattatttcatatctttcagattttggtctttcactcatattaggtaaatttattaccattggtatacgtcttctaaatgtttgaagtaaattagaatctggattttctgttgtagcacttattatgagaacatttgcctttctattagaactactttctcctaaccttctaaattctcctctatctattaatgaaaataagatttcttgcccagcagcaggcaatctatgaatttcatctaaaaacaatattccattattagcttgttctacaagaccttctctatttgcatctgctcctgtatatgcaccttttactaccccaaagagttgagctatcaatagattaggattttctgcatagtctgcacagttaaacactataaatgggctgttctcttctttaatgttgttttttatagcatatttatacatacatgtagctaattcacttttacctactcctgtttctccatatattatagtatgaaggccattaggaggatacattattgctgacttagctagatttaccttttctttcaaacttccctttatacctatcaattcttcaaatccatcttcttctacaactttactcaccttcacatactttcctgatgatgctgggtctttatccttaatcccaatctttgactgatttaaattttcctcttttaataattttgaaactgcacttctcgatatattatatccattttctattaatatttcagttatttttctttcagacatttgaggattttcacttacaatttttgatatatcttttattaatattttttttcttctttctctcgaatctaaaatattattttttttcctaactgatatcacttcagacctagctacatttaacatttcagcaagttcttggtcagtatatggattttttttatcttctctttgtatctctcttaatattttatccatttttcgcctcctcacttaaaaaattaatctatttcaataatatgtttcaatatattatacaccaaaataagactaggcaaaatagcctagccttattacttagaatttccataataacctctttaatatacttataaagcgtagtttataattataattttaaaaaagcaccttcccaatccttcataaagctatctattcctttgtctgtcaaaggatgcttaatcatttggtttataactttaagaggaactgttgctatatctgctcccattctagcagcttgtaaaacatgtattggatttctaacactagcaactattatttgagcctcaatactatttacactaaatatatcaacgatttcttcaattaaatcaagaccattttgtgatatatcatccaatctaccaacaaaaggacttacatatgtagctccagctctagcagctaaaagagcttgtccagcagaaaatataagcgttacattagtctttatacctttacttgatagtactttcaccgcttttagaccttctgctgtcataggtatttttataactatatttttatgtatcttagataatttttctgcttcctctatcatacctttatgttctaaacttattacttctgcgcttattggcccatctactatttcacttatttctttaactacctctataaaatctctaccttctttagctattagagacggattagtagttacaccacatattacacctaaatcatttgcttcttttatttcttcaatattggctgtgtctataaaaaacctcataaaaaatcctccataattacatagttaaaatatgtgctaaacacaattatataatatcataaattacctaaattttacagttccattatctatagattcaactactgccaaagactctaatcttacatcattagcctttaaaagtgctcctccagcttgaaatcctttttcaatgacaattcctactccaactaagttagcttctgcttgctcaattaaatctttaagtccaagagcagctcttccatttgccaaaaaatcatccactatcaatatattttcgcctttgtttatgtactttttagaaactttaactgaatactctcttgccttagtaaatgaatatacattagtttcatatacatctttatccaaatttttagattctgatttttttgcaaatactacaggtgcattatcaaaatactgtgaaacaattgatgctatagctattcctgaagcctctattgtaaatatcttatccaccttttctcctttaaatctctctttaaattctcttcctatttcatttaaaaaagctacatcaatttgatggtttaaaaaactatcaacttttagtatatcatttcctgaaacactgccttctctcaatatcttttcttgtaaagccttcattgaacttccacctagccctttctaaaattatattaataaaaaaattatatttgttctaattttgctatctattcttgtaagtattttatattaaaatactaaaaaagctcctgtctatatcatagacaggagcttaaaattcaaagtaattaacttaatatataatttaaaataagtataaactatatcttcttcactcctgtagtcaagctattaatggtagcttagtagaaacatttgaaccatattatcaaacatatacaggtaaatatattaatttattccttttaattatatattataattctctattattcaacaaataattcaaactgtgtagaataatatattatagttactttatcagaactactttttttcaagtaaatttataaatttttcataaatatataacttttttcgatattatttaaaatttcttcgtcattgcttatattagctattttagcaacggctttttttaccccaatagactttatcaactcttgtaattctacactttgagtatcttcactattattataatgaagcgctgcacctattccaagaatcaaattgtcaactgataatccatatgattttgctgtcattaaaggtttaatcaatctatctttatcacttagttttcttaatggttcccttccgactcttaatacatcatcattaagatatggatttttaaatctatttaaaattttatcaatatatttatagtgcacttctgagtcaaaattgtattttttaatcaatccttctccactttctaccattgcacttttgactatatcacagataaatttatcttttatactctcttctatagtcttatatccttttaaatatcctatataagctgttatagcatgacctgtattcagtgtaaacaatttacgttctatataagccataaggttatcagctaaattcattccaactatagttggtatttcccctttaaatccttgtttttcaacattccactcataaaaattttcaactgttacatcaagaggattttcgtttttaccaggaggaactattctatcaactgaacagtttggaaaaccaacatacatctctaaatattctacttcttccttatttaaatacttaagtacctcttcttttaaagaagaacttgcgtatattgcattttcacatgctattatatttagattacttgttaatcccttttcttttctagcttttataccttttgcaattgtagaggctattttagtcaaaactaaaggtccaactgctgtagttattatttcagcctgtacaatctcatctattatttcttcttttatagatgaaaccgcacttatattatcaattacttcatctatacattctacatctcttatgtgtatagtatactttttatctttgtttattgagtttaatatctcctcatttacatcagcaaatactacatgataacccgacttaactaacaagcttccaataaaacctcttccaatatttcctgctccaaactgaatcgcctttttcattttaaatccctcctaagattagttggcaaaagcttccataaaagcttgtttgtcatttgaattttttagtctttctgttaagtcatcatctaaaactactgctatattagatagtatttctaaatgttcatctccaacaccagctattcctattaataaatatgctttttctccatcaaaatctataccattagggaattgtaatataactattccagaagataatatttctttttttgcttcatttacaccatgtggaatagcaactcccattcccatatatgtagtcattactttttctctttctaacattgctggtatatattcttcttttacatatccattttcaactaattttcttcctgctaaagttatagcttcttcctttgaaacactatctaaccctaaaaatatattattctcattcaatactttactcatagtatcaaccttcctttttaatattaattttatttatctataaatgcttttaatctgtttgtataaaaattaaaaactatatcttttacctctaatgtcatctcttctatagagaatttatttatcttattagtaaaaattatattgtctattaatgaaccacttatttcactcattatttgtctttgataacttggtgaatttttaggaagtaacataaaaactacattatcgatttcttcatttgaatctagcacgattctattctctagttttattattgataacttcataatatctattctttcactcatacaatgtaacaatagaatttttgattcttctatatatggaattgagatttttaatctttcttttaacgattcttttatagagattatatcttcactagattttgcaaatatttttgatgagtcttcaataagctcacttaaatctttactttcaaatttttcaaatctaatttcctctaaaaattgaagaatatcttttcctatattcatactttctgttatctgttcatatactttattcttacttttagtatcatttttcgcatttaaattgattaatttattttgagctatagattttattttttccttgattatctgttcatcatctaaactcataaatggacctacacatatataatttaaacttgtatttaactcaactgtagacactattaaatcaacatctttttcttttaaatactcttcatctatgtttatagctgatatggtttcaagtatatttaaattaggaaatttattttcaatcttagttgataagaatcttgaagtacctattccagtgggacatgccacaacaatatttatattagtattcatcataagatttttttctatggctgatgcaaagtgcattgcaatatatcctatttctgattcaggtattgaatttatatttagtttatcttttataattctagaaatcttttcaactccatcataggcatatgaatacttgctttttatttcatctaaaagaggatttcttatttctaatcccatattcaatctatttatagaaggccctaagtgatttgctaggtctttaaataacctctcgtcattttttaaacttattttaaattcatcttccgccaaatctatcatcttatttgtaatttccattatttctatatcatctaagtttaaagccttatggtttgaagatgacctttgctttgcacctcttatatgcatagttatatatccaacctcatctactggtatatccatgttaaaatctgtttccataccttttacgatttctttagctaatttaaactcttctgttatagataattcttttagaaactctttatccatagttatattttcaccattttttatcctctgtaaggctaatgaaatatgaactacaagccctatatatgcactatcagctaaatttacatctaaatctgaaagcttctttgttaatgtagcttcaacttttcttattatgcacctgtccattaaatttaaaagtctattttcacttaaaatttctattgctttatctgtttgtatattttcacttatatttctgaccatatctagtatttctttttcattgaatgaatcgtatataagatttacatatgcctctctaaagtttttttcttgaccttttaagtagacaccaagccctggttttctaacaagctcaatatcaaatctttccaaccatttacttgctaaggcaaaatcattattcagtaccccttcagatacctttaatatttttgcaaaataataggattttactggctcgttagaaactagtagctttgataatataattaaatttctttcttccttgctgtattctttttctattttttcttcttctaacaactcaattataaagttttgattttctatattttcctctaaaatcaatcccactcctggtttttttacaaagttaaaatcattttcatcaaaccatttttcaattccagacatatctctaagtacagttcttgaacttagctctaaagtccctgcaatctcagaaatagttattggaatgtttttctttgaattttctactatcattagtattatctttttttgcctagatgtaatcttcttttttttcaaattatccactcctaattagtggtactttttatttttatttagattctaatcttttaaataatgcatctaaatttgggtcatttaaaaaattgtttattgaaactatctcaacacttgaattattcttagcaactctttcaactaatgtattgtgagttactactatttgtgtatcatctggaagattatcaacagatgaatttgtaatttctatatttaagtctaagttttttattctatttttaaatctggaagctcccattgcactcgaacccattcctgcatcacatgcaaatacaatcttcttaatctcatttacttcaagctgtttttcctcaatatttttctcagagttcttacttgcagatttcatatcactcatttttgctttagcttcttctaaagaagtactgtcttcttcactttgatttgctgaagctctcttaacaaatggtgctgccactaagaatgatacaactgttgccactgcaactcctgctaatactggaagtaatcctccctttggagctagtgccataagtgcaaatatacttcctggtgatggtgctgctacaagcccagctcctaatattgaaaaagtcaatattcctgctgctccacctgccattgtagccaatattaaaactggattcattaaaatatatgggaagtaaatttcatggataccaccaaagaaatgtattattacagctcctggtgctgattgttttacacttcctctactaaacatccaatatgctaatagaactcctaaacctggtccagggttactttctagtaagaacattatagatttacctgcttcttttgcctcagctatacctataggccctaatataccatgatttattgcattgtttaagaataatacttttccaggttctataaatactgaaactagaggcaataaacttttgctaactataaattgaactccagattctataagagctgtccctgctactattgctggtccaattgcataaaatcctagtattgcaagaagcatacctattatacctattgaaaagttatttactaacatttcaaatcctgttggtatctttccatctacaaatttatcaaacttcttaattacccatcctgcaaatggtcccattatcattgctccgataaacattggtatatctgcaccaacaattactcccatagctgctgctgcacctattacgccacctctttgtcctgctattgctttaccaccagtataagctatcaatagtggtaaaaggtattttatcattgggtcgcctatagtactcaatttttcattaggcatccatcctgttggtataaataatgctgttataagaccccatgctataaaagctcctatatttggcattaccataccacttaaaaatttccctactcgctgtatagatgtctttattgtcgattgattagaactactcataattttacctcctcttgaattatattctatatcgatatgattcccttttgttatacttttattatagagtttatattttatagtaacaactttaagaaaccgtttctatgtcactttagataatgacatttgtcattttagtttttgtttaattttatttatgtagtattttggagtatatgattttgtaaataatactatttttataaaatatttaaatttaatagaaatgaaaataataattcagttaaataaatttattaaatgtacttttggatatactaatatagatttaatttatctgtatttttgaggtttatgcactctctagtaatattatcaatataaactatacaaatgtaattatatgaatcactaaagattaattttaaattagctactattaaacactaaacattatttaatatacaactttaccctataaggcaatatatattaaacaaatttaattaaaatagtttaaatttttcaaaaatctcaatatttgacaaaatactttaataaaattaaagaataagttataattaatactatcaattataaaaagtataaaaatataaggagtgattaaaaaatggcgttttattttgatacaccatcacatactttcagtgaataccttcttgtaccaggtttctcttctactgattgtatacctgctaatgtaagtttaaaaacacctgttactaaatttaaaaagggcgaggaagcagatatttatatgaatatacctttgacttctgctattatgcaatctgtttctgatgacaaaatggctattgcacttgctaaagaaggtggtatttcatttatatacggttctcaaactattgaaaatgaagctgctatggtagcacgtgttaaatcccacaaagctggttttgttgtaagtgattcaaatattaaacctgataacacattaaaagacatacttgacttaaaagaaaaaactggacattctacagtagctgttactgaagatggaacttcaactggtaaattattgggtattgttgcaagtcgtgattatcgtataagtcgtatggatttagatactaaagttagtgaatttatgactcctatgtcatctatagtttatgctaacaaagatgttactttaaaggaagcaaacaacattatatgggaccacaaacttaattctcttcctgtacttgatgataatggtaatcttatgtatatggtattccgtaaagattactcttctcataaagaaaatccacttgaacttttagattcttctaagagatatgtagttggagctggtattaatactagagactttgctgaacgtgttcctgctttagttgaagctggtgctgatgttttatgtatagattcttcagaaggtttttctgagtggcaaaaaataacacttgatttcattcgtgaaaaatatggtgatacagttaaggtaggagctggaaatgtagttgaccgcgagggattcctttacctagctgaagctggtgctgacttcgttaaagttggtattggtggtggttctatatgtataactcgtgaacaaaaaggtataggacgtggacaagctacttctataattgaagttgctcaagctagagacgaatactttgaaaaaacaggtatttatattccaatttgctctgatggtggtatcgtttatgaccatcatataactttagctttagctatgggtgcagattttataatgcttggtagatacttctctcgttttgatgagagtccaactaacaaagttaatataaatggtagttatatgaaagagtattggggagaaggttctgctcgtgctagaaactggcaaagatatgaccttggtggagataagaaactttcttttgaagaaggtgttgactcttatgtgccttatgctggttctttgaaagacaatgtaactctttctttaagtaaagttcgttctactatgtgtaactgtggagcacttagcattcctgaacttcaaaaaaatgctaaacttacacttgtatcttctactagtatagttgaaggtggagctcatgatgttatgttaaaagataatagaaatttataatataaatatactttaatcatttaaacaatgaaaaagagacttatctctattttgagacagtctctttttatattagtataatttttatttaactgtaaattcaagaagcttacttttaagttcattttctatttttgataattcaacttctgcttcttgtctctttattctaccatcatgttgtattttaactacctcatcaatagtagatattagagattgattagttttcttaattgtgtctatatctacaattcctctttctgattcttttgctgtttctattgttcccatcttcaaagtttctgcattcttcaataaaagctcatttgtcatattactaacttcacgctgtgctttcatagcttgatttaagtgagaaattccaagagcaagcactatttgatttttccataatggaatggtatttactatagttgattgaatcttttctgccatcagattattactattttgaaccaatcttatctgaggagccatttgaagcgataccattctagttaattctaagtcatgaattttcttttcaaatctgtcacaaagtgaaaccatatcatttacagattgagcatcttctgttgaaccagataaacgagctttttctctcaactttggcatttcatattctttcatatcctttaatttttgttttcctgctataatatacatagtaagctcttttgagtaagctaagttcaattcatacatcttatcaagcattgctatatctttcaatattttaacctgatgcttttgaagctctttacttactttatccacatttacctctgcactatcatacttagtttttaaatttgaaattttattatttgcctttttaaaaattcctaaaaaaccactttgttctttttcatctgctgaaaatgcttttaaatcagtaactagatttgtaagcatatctccaacttctcctaaatctcttgtttttacactctttaaagctgtttcagaaaaacttgctacctttttttgagcaccagctccatattgcaaaatcatatttgtatttgtaatatctattttttccgcaaattcctttaccatcttgcgttcagattcagacagtttttcttcttctgggtctttttcatcctttttcattaataagtcagaattatctatatcattagtgtttgattcttctccaaatgggtcaagtgtcaaagttggcataactggtatatcatctaaattattcattgtatctttctctcctcttccttcataaagtactgattaacttatataatacacattttatactttatgactaattaattgtttaaaaataacagaatattttttctattgaagttaaaatttaccactcgttaatccttcttggactaacatattctctaaaacagtaatatctgtagaaatatcaatggcttcatcttcaaacagatagtccaattgattttcaaaagctactacaatcgtattcattgtattttcaatactttccatagttgttgttatattttctctatcaattccttgttcttccaatgtatgatatgaatttaatagttttaaagtggttggaagataataatccataaatttttgtatttgagtaagttttgatgggtcatgttttacaacatcaaatattttacttgtaacatcttctacttgtacaattttatcgcccattgattctgatttaatatttttattagcttcttttatttgtgttagataattcattcctttatttataattgtatcaacttcattggattcatcagtcttttcttcttctttgacttcatatgctacatcttcatatcttggtggaataaaatcttcatttgttaacacaatctgattatttcttttatcaatataagtatttataaagtagtttttgtctatcatcttttgtacatcttttattataaaatttaatgatttagatgtgttttctgcaataagttctactggaataatatttctattgtttataattgtacaatattttttataacgagaaatttggtctcctaatctcttacctttaaaaatacaaactcctcctataagtaaaaatactgcacatacttgaataggaagtattacagcccatccaattataatggaaatagttgaaagtactaaggctgataatgtaaataagcttaccaaaccccatccaattatttttaaaaatttacttaaaaatgaatttattaatacagatttttttgaaaaattttctgatttatacatattttataatcctttcattttcactaatattattaatatattgcagtttgattatacaattacttacttattactgtcaaggaatttgaaattctacaaattgtttcaaataaagtaatagacttaaatataagcatattttaaattaaaaatatacttatatttaactccatataaaaataagagaacttaactttaattaaaatttaagttcccttatttttatttgtacataaatataattagcattgtttatgttgactatacatataaataaaaaattgtattaataaagatttgcaaatatctctcttatttcctctctactaagctctacataattattagcaagtagtcgttgttgatttgctattgtactatctgtaaattcatctatctgactttccaccattccatattctctcaaagcttttttagctattaatttatttaaaaacttttctaattctccataaacatcacagttagggtcacattcaagggcatctgctaaaatttttgtacattttataatttttccattaggtttttttctagaatacatcttaaatacttcagtaaagaactgataatttgcttcaccatgtgcaacatggaaagctccacctattgaataagatagtgcatgaactgctgcacaaccagcatttccaaaagcaattcctgcataatttgatgcaagtacaaagtctctaagatgattaaatctctcttcttctcctttatcaactatcttcttatacccatccataatcatttttattgcttgtagagaatacatctctgtaaatggacttgcttttggagaaagataagactcaatagcatgtataagagcatctaccgaacttgtaacaaagaatttgtaaggtaacccttttactgtctctggaattaacactgcatagtctgcatatgtttcttctactgcaagcccctttttagtatgtttagattttaactctgcaatagctacatttgttacttcactacctgtaccacatgttgtaggaactactactaactcttttacttttttaggtgatacttctccttcaaataaatcaatagacttttctggaacatcaagtgctaatatcttacatatatcaactattgttcctcctccaaacgcaataattctatcaaaattgtatttcttcatttcctttgtcatggagtctatcatttcatcagatggttcacctgttccaaacttttcttgaaaaattaaatttgtatctattccaagaggtttcatatatggctcatatataaactcattagtaattactaaatcattttttcctattttaaattcttcattaaattctttaaatgtatcaaaataaaatatctttggaactactctaagtgcttccattattaacacccctctattattaatatttctccttaaatctcttttcaaattctactgctagactttctcttacacttggatgagctatatttattaaatttcttgctctttctctaagagattttccttttaattctgctataccgtattctgttacaatatagtcaacatcatttcttgatgtcgttataggtgcaccttcatccacaatagatacgatttttgaaattactgtaccatctttttttgtagttattgaaggcatagctataattgcctttccatcttcccccatagacactccacgtataaagtcaacttgacctccaacaccactaaattgtctaagtcccatagcctctgcaactacctgtcccattaaatcaacttgtatagcagaatttatagaaaccatcttatgttgtttcattataattgctggatgattcacatagtctactggttttacctctactgcagggttattatttgcaaagtcatataattttttagtacccattaagaaggtaactgtcattttttctttatcaaaatttttatatttaccatttataacacctttttcataaagggccaaagtcccatctgaaatcatttctgaatgaatccctaaatcctttttatcagttaaaaataacataactgcatctggtatcccaccaatacctagctgtaaagtagaaccatcttcaattaatgaagcacaatttttaccaattgcttcttctacttctccaatctttgcaggttgtagttcaaataaaggttgtgatttttccactatatagtcaaactctgatacatggactacctcaccataggttctaggaaactggtcattcacttgaacaattactgttctagcagttttaatggcttcataagtataatcaactgatgttcctaagctacaatacccatgttcatctggtggagttacctgtgctaaaacaacatcacattttaatcttttttctctaagcaactttggtacttcatggaagaatgcaggtgtaaaatcaccatctccattttcaattgcctttcttacatttccacttacaaacattggatttactctaaaatgagcttccattcccttagcagtatatccaccactacccaagcttaccatatgtttaatctcaacatctttatattgttcagcattttcaatcatagcctctactagtgcaggaggttcacctacacaatgtgcaaatactacagtatcaccgtttttaatctgttttacagcttctgtagcactacataatttactttgatacaattcttgccaactcaatgaaatccccccatttagcttttttaagtttcacaaattgctgattcaatcacatttataactctttctatatggctaaaatcccacatcttaacacattcatttttcactttatattgttgataggatgcgcatagagttgcgcatcctccaattataagtagcaaatcatactcgacgttctcttgtgctatgctaaaatctaccctaccattgaagtgctctttgattattgtaagagccttccctctttcgtatctagggttacagcccccacaaaatctaactccacaggtcatgtgtaaattctccttattaaaaatttctttacttagctaaaaaccaccataattttataactatctcttatactacatatcttttcattaattaatacacattaatatataatttccctttatatatcaactttttataaatttaaagcttcctctttttttattcccgcaattttcttagctaattctttcttttgatttatgtttccttgtcttgaaatcattattctttgagcttgtggtgaacctgccccatgcattgactcagttctataaccaacagcagatgaaccaagacatatattttctaagaatcttaatattctcattctttcttctgttgaagccactgaagaagctttaaaatacttgttacatacttcgccaatagtcattccacttgttccaactttaaggtctgatttaaagtctttttctgaaggcatagtaaccataagccctccagctatatcttctgcaagtcttactatttcataaggaaatctagttacattttgtttacacacatttgcaagaagtaaatctatttgatagtttccagcttctgttttgtgaccttctgatgaacatgctataccacagcaatataagctttcattaaggtgagtcatttctattagtttatcttttatatgtgaagctttgtttgctccattataatcagctgctaaagctgctgctcctattattacatcacctactcctactttacatccaccataactttgtctatggtatcctgcaaatctctctactaacataccagagaaatcccattctccacataagaaaattctatcatttggaacaaatacattatcaaatactactaaagcttcttgacctccaaactccttatttcctaaatcaacatctgcaccttcttctaattttctggtgtcacaagattgtcttccataaatcataaacacaccttcagcatctgaaggaactgcaaatgatacagcgtagtctttatctgcttcagtcatacttatagtaggcattataaggtgctcatgtgaatttattgaaccagtttgatgtgcctttgctcctcttacaattatcccatcttctcttctttctactatatgaaggaacatatctgggtcaggttgagcactaggtgatagacttctatctcccttagggtcagtcatagctccatcaactactaaatcgttttcttgtatataagttaagtattttacaaaattatcatgataattagttccatgggctttatcacactcaaatgttgttgaatacactgcattaaacgcatccataccaacacatctttggaaacaagaagctgttttttgaccacatagtctttgcatttttactttttttatcaaatcatcaacactttgatgaagatgaccaaatctatttattttttcacctgtgatatttgaagtaactgtcattaaatctgcatattctgggtcatgagctaagtcataagttgctgctacacaatttatagatggtctaatcataggatggtcaacccaattcttaacctcttcaccaaacatataaaccttagtatttaattttctcaaactttcaatatattgagctcctgtcattaatgccataataaaaccactccttctcttttatagatttttttatttattttaaattataatacttccttcttctatatgtctcttaatattttaaatttagtccaataaactaatttaaatttaatttatgtcttaaattcattctaaattaaaatatattcctactttaatttagaatgaatattttttgtctaagttttatccccaaagttcttcatctgtagggacttcattttctggcatataataagcaattctagaaatattaattagatgcttataatcaagattttcagagatgctgttatttccccaagaaccacaacctagagtattagtaggtgcaagaccattaaagaaacttcctccagcactagtagcacaacattgattaataacaaatcttgatacttctatattttctcctgcatattctatatttttaactgtatttgaatgtatagatacactatgtccttttccttctacatttaaatttgcttttgcaatagctacaccttcttcaaaacttttatacttgtatgcagatataactggacacattttttcttttgcaataatatcctcttctcctggtccatcagcttctattactattatttttgtatcttctggtatctcaacacctgcaatttttgcaattgtatgaactgattgacctactgcatctttattcatagatttatttacaaacatagcatttctgaaagcttctttttgtactttatctctaactataaaacctttgttatttttaaattcatccattattttatcaaacatttcttctgctactattactgactgttcacctgaacaaatgataccattatcaaaaattcttcctgctatgattttaggtactgcttctttaatgtctacatctctatctatgatacattgaacatttcctgcccctacaccaagtgctggttttccacttgagtacgcagcttttaccattcccattcctccagtggcaattactacatctgctgatgaaattaaatttcttgtattttctcttgattgttggtcaagtatttgtattaaattttctggagctcctattttttctaattcttcattaatcatctctacagtttttgtactacatccaattgctttatgatgaggtgtgataataattgcatttcttcccttaagtgcaaacattgcattgctcataggtgtaacgattggatttgtacaaggagttattgccgctactactccaactggtttagctacctttgttattccagtttctctatctatatcaattataccaactgattttttatcttttaaattgttatatataacttttgctttgcttttatttttagctaccttatcttcatatactcccattccagtctcttctacagcaagtttagctaaatattcagcattataatacactacttttccaactatttttactattttatctacttgttcttgagtataacattcaaactctctttgagcttttcttgctctctcaatataaccattaatgtattccttacttaaatcttcaaagttttccactgctttttccatttaaaatctacctccaatttattaaatattttataatgcacttttaaaagtttcagcctttttcattgtacctgtactcataaatttactatgccatgataaagcttcgtccaatatgtgaggtgtttgttttgctccacttttacaagctctatttaaataatccctaagttgttctttataatctggatgggcacaattttctattatttttatagctctttctctaggtgcaagacctcttaaatcagcatatccttgttctgttacaattaccattacatcatgttcagtgtggtctacgtgagataccataggtactattgatgatatatcaccattttttgcaatcgactcagtactaaatatagttattgctccatttctagcaaaatcaccagaacctccaattccattcatcatctttgaccccattatgtgagtagaatttacatttccataaatatcaacttcaattgcagtgttcattgcaattacaccaattcttctggctatttctggattgttactaatttcttgaggtcttaatataatcttatccttaaaaaaatcaatatctttttcaaattttattaatccttctggagatggacttacagatgtagtagatgccattgtaactttacccattcttattaaatccaacatagagtcctgtacaacctctgtataacaagttaaattttcaaattcagattcacataatccatataatactgcatttgctacacttcctacaccagattgaagaggaagtaaattctttgataatctgcctgcctttacttcttctcttaaaaaagcaataatattatttgatatttttttcgaagcttcatctacaacccccaatggacgggtcttatcttgcatattggtaattactactcctgcaattttatccaaaccacaaggtatatatgttgttccaattctatccttaggatgatttatttctattggttttctatttggtggattttccgtaatatatatatctgccataccttccatttccattggttttgcaagatttatctctactattactttatctgcactttttataaaagatggagaattacctatcccactagttggtataatattcccttcttcagttattgcaagtgcttctactatagctacatctactttaggtatagttccataatttaaaaattgagtagaatgacttaggtgcatatctatataatcaacaacacctttattaatattatttctaagtattgaattagtttgataaggaagtcttctttcaattatacctgcttctgaccatgctccatcaacttctgggcctaaagatgctcctgaatatacggttaattttatcttttctccacttttagctctttctgaaactgctaatggtactgcttttggatagcctgaaggtgtaaatccactaactccaataaccatgccatcctctataattttagcagcttcatctgcattcattattaaatcacacaattctttatttcttaatcttccacttaattcttcaaatgctccttcattattcataaatatccccccatataaaatcttatttacattggaagtttgtgtaaaactataaccaatataactttagttaataatgcaaatggatacgtagcaccataacctgctgctgggtcatcactatcaagagcatcaacagcagctccaagacctggtgttgatgtcataccaccacagacagctccagataataaaatccaatttaatttaaatacgtatttgccaactaagaatcctatcatcatagctgtaacacctactgctattgctactaaggctaggtgcataccagatgtcataattgaatcaactacttttccaccatatcttaatccaactattgctaagaaaaatactagccctatttgttttaaaatatttaaaaccttttcttccattctgaaatttactacccctatcttacctatatatccaagaactagagatacaattagtgaacctcctgttgcgcctagtgtgaagtaccctagtggtcccataaatacatgtattcctccaactaagtatccagctaaacatgtcaagaaaaatgttattatattaaatggaacttctggtatcgttttaccagaaacactatctcttgcttccttcatttccttctcatattttcttctttcttcttttaggtccatcctaaataattttggaaggaaatttacacctaagattactattaaaactccaaaaggatatgcgactgcatgacctataccaacaccagcttcagcatatgcaatatacttatctatttgctcttgagtcagtgatgtagttgtattcacatccaatttgccttctgggtcgactacttttaaaatttcttttttatcttttattgaagctttttcaaattcttttgatacatcttctgcatgtttaccagctgtttctaaagcagcagctaatccaggcgaacttgttaatgctcctgtgtaaacgccagaaacttcataagcactacttcctttatcacttgatagtaaagtcattgcataagtcatagagccacctataaaagttataagaactcctaaaattacaaatcttgctccatacttctttaatacagctttcatatcttttgctgccaatagaccaactgctgcaacaaatattattaaaaagaaatcaaagaagtcagaagaaataattccattccccatcattacagttgctgccttatatcctgctgctgtttctccttttgctattattagattccccaagctatatgcaagccatccaataaataatcctgtaaataatgctcctgataccccaaaattaaacttcccaaatttaatttttccaaataaaattcctgtaattactgcagcaaacataaggacaaaaggattcattaaaaaatccatcaattcaaacttcactaaatcactccctttcatttttcgttattaaattaacaaatattattaaaaaatatatttctcctttctccccaatactctattttgttattaaattaacatttctgattaaaaaaattttatcttgttaatatcacttttttctttatgatttaattaacaatttaattgtaaaaataatttttattttctaatagataattttttgatattcgttgatataactgtaatatagattgatttactctaaaccataccagctattctcttttgttaatttaataatagcactattcttaatagattgaaaatatcaaaaacttatgctatgatagtttaaaactattctatttttttacaacaatatacaaaacttatgctattgttaattatatacttgtcactaatatgtaaatgaaaggaactaataccaaatgaatataaactatttatactattttcaaactgtctgtaaatataaaaacatgactaaggctgcagaaagtattcatatttctcaaccatccataacattagcaattaaagaattagaaaaagaacttggctttgaacttttttacagaataggtaataaaatagaattaacgcctgaaggaaaaatttttttagacaagtcaaaacattttataaaacaatttgaggattttcaatgtgacgcacttgatttaggaaaaaagagaaaagcttctctcaaaataggtattcctacagttttaggtacgtttttgctttcaaaaatacttcctagatttaatgtaatttatccagatatagagcttaaaatttttgaagttccaacatttgttggagctaaaatgattgaagaatctacacttgatttttgtattggtataattgacagtgatatttatgatgatatagattcaaagacaatctataaaacagaattgtacttagttacaaatcccaaaaatgaattggcaaaacatcccattatatcaaattatatgttaaaaaatgtaccttttgtaatcttatctgaaggttcttatcactataagattattacaaaaagacttgaaaaagctaagccaaatataattttacactcaaatcaactttctaccatacgttatttactagaaaatgacttggcttcaacaatattgtataaagaaatatttcaaaatacagaaaatctctgttcaataccattagaacgtgcaattactgcaaatattggagttctttggagaagaaatcaatacatatctcatagtatgaaactttttattgagtatatggcatctattcatataaactaaatttatattatacagatataatattttgtttaaatacaatgttaaaatattttaataaatagtatagtttagagtatcagtataaaaatacaatatagaatgttatagaattataattgtatacatttaaatctaaatattattatactgatactttttaaaataccttttattgataatacttttttaatcaggtttacttggacaacctagcaaaaaacccacgcatcctgagacaaaatctctcatctgtgaaatagtacctaaagaagctgatgttgtagttgtaaaatttcttacaacaaaaagtactgttaatgctgctatacaaattacagtagctataataatttgcaattcactagtttctccttcttcaaaaccttcattattattaataggtattttcttttcataattatcagcttctgaagtaaatccaatggtatttttgacattcattatattattttgactagactcttgaccttttgggggtaaattattatctataaaaagatttgaagatacatcagtatttgtatacttccttaaaggtctctttataaaattagcacttaaaaaatacccaaatatagctgctgaagtggttcttactactacatcaatagttgtagtatcttgtgaatttacttcattaacaaataaattatatatagattgaaacattaatattgccattacaattataaggcatctatcaattaatttgattttataccaggctttttttatattttttataaatttatgttttttatacatatatactatcacctcttacaataaaattaagccctctttactataatatgtaaatagagcttaatagtgagattatgttatattttatgtaaaaaaatatatataaattaaattatttgtctaaaatcatcaaatctttagggaatttagtaagtctttctggaccatttttagtaatcaaaacagtatcttctattctaactccaccccatccagggaaataaatacctggttccattgttattatacatccctcttctatgattttatcaccataattaccaatgaaaggttcttcatgaacatccctaccgactccatgtcctataccttgatagtaatagtcttcatattttttgacaacttttcttatctcagcatctggaattgtcgcatgtacaccagctttcatgttctcaacccctacattttgagcttccttaactaaattatatatttctaattgcttttcagaagctcctccaactataaaagttctagttgtatcagatatatagccattatacatagcaccatagtctataagtacaaaatcacctttttctataatcttatcactaggcttaccatgaagcaatgaagtctttgctcctgatatcagtatagtttcaaaccctatattttgtgctccgttcattttcataaagtactctaactttgtagccagttcaatttcgctaactccagcttttatatgtggaatcaattcttctaatgccttatccgctatttcacaagcttttcttgtatttttgatttcatctttgtcttttacatatctcaaagtctctacaatattttctgtaggtattaattctccattatccttctcaatcagatttttaagttcttcatatttatcaaacactatattagttctttcaaacccaagtttctttatacccactttatcacatacacttttaactgcctttgccacacttctatcaaaattatgccaatttataatttcaaaatctttgcaaaccttttctgcaagctccatatatctactatcagtaactaaaaagtttccatctttgcaaatcactgcatatgcttcttcatcaggaaaaccacttatatagtttacattagttttctttgttagatatagtgcatcaacacctttagttcccaacaatcctactacattttttactctgctcatgattttacctccaaataataaattttatcttaattatattatatcactaattaatcttatttttatctaacagatactttattcctaaaattttttcatattttattaatttcattttaatacttcattagtttttatttagttagaaagcttaattttaattgaataaatataataaattagctagagaatcaaataaatggattgtgttaatatataaatattgacaagatataaaataaaaagaacatataattataatcaataaaattataactatatgttcttatttacatataaaaaatgtacttattttgcagtatatccagctttaactaaagtttcaactgctaagtctcctttagcttcatttactaaaactattggacctgtacaacccataccactttcagcatagattccgtttttccataactcagatactgcatcttctaaatccattatatcaacaccagctatttgacgagtaacaatttctttatctggcattttaacttctactttttcagctttaacttcttttttagtaagagaggatataatgtcatcaaattttgcttttttaacctttgcaaattcatttcttgcaacattacttatatctccctttacaacatcataagcgtattttaaagcatttgctactaccggagaacctgatgctcttgatactataagtacctttctatcatagtcttctccaactccaggtccgtatccaaagccttgagcttcataatctccacctgtagtatatgaagaaaatactttcataaatatatttccagataatgtatcagtaaccataacatcaggtgcacctacaagtaaatcattacctctcattacacatccaccatctgctctaattgaatccgcaaactccatgtcatatccattatcttttaattcttttaagcacttctcaacttgtcttgctccatcaacattaagtattccaacttttgggcatttgttacccattgatttagctgtagcaataccataaatggcatttcttaccattgcctctattctattagtagcacttgttcctgttgttgttgcaagtatcatttcttttccttttgctggagttattactctacctactgtagatacacctattggaaaattataatgcatagtaacacaagcatcaatatatcctgaatctaataattcttccatttttgcatgcatttctttttcatcattaacttcaactacttcaaggtcagtttccacttttggtccaataagcacaatatcaaataaattagattttgctaattgtgcaccattaaccatgttttctacaccatgttcacttccaagtgtagtaacaccaatttttacttttttgccaaattcgccgctttctattgcattagctacttctaagaatacatctgcgattactttttttgacatatcctcacccctattcttctaacatatctaatgctagttttttcatagattcagctattatcttcttaatttcatccttagatattcctgaagtctcttcagtaacacctgtatttctttcagctataaaagatactccatcaaataagttagtcattcttcctaagaataaactaccttttccaactatcatagctctatttctatttcctgtagttaaatcatctattaaaaatcctatataaggagctcctgatggtatatgtccttgagttggtgcccatcctggtaatcctttgttagaaacaaaatctttcaattctttcttttctaagtctccacgtttaacagcaagtgcccctatcattttgtagtttgcttctggaacatctcctgctcctgctggcttagttatatctgggttttgcatttcaactgaatacacatcaacatctgttatttttaaattagctctatcaagacctgaagttataagtgctgtcataactgcttgtggtgaagaaccagttccaacagtatgcttacctgttaaatcagttcttataactggatttacaccatcattttcagatacaagtactgcaaatcctccaacaacatcttcaagtacaggaagaccttttttaacatggtctttagcattcattccaagtttagcacttgctccacctgctactaccattacatttttatgtatgccagcttttactaaagctgctgcttgaattaatgcatgagttggtgctgcacaaaatcctcttgtgtcagaaccagttgcattctgaagtcctgctatctcagctattgatttagcaaagtttcctccacctctttggtttatatctccacaagcttcttctgaacactcaataacataatctatttcagcagggtctattttgctatgtcttagcatttgaatagcagataaaactccagatgcttttactactagattttcaaacattgtatgggcatttaagttaacatctacatcatgtgctctttttacataaccaacaaattttccatcatggtataatccttcagctatgtgtgttgctactaattctttaccttcttctatatcatcaccctttaatttacctacaaatggtgcaatttcagggtagttattttcgatttttggctttacttcatcaataaattcttgtgataattttactaaatcaaatgcatcacttatttgcattaaagctatgaactcatcttgaggcattatttctccaaacttaccatttctagttccctcaatcttttgttcacaccatggcattggtaaatctcttaattcttctggtcttctatttcctatataaacttgatttggcatgtagttaactacatcttcataacttcttatatgattacttacttcttttaaaaattctgaatctgaatttgttgctctttcaactgtacaagtacttccattttgcactatcatatctggagtatgaataagtacatagcctgccccttttaaaactggataagtcattttgtgcacctccataaattttatgaacacttattttttaatcttattaaacttattaaaagctctaatcattgtattttattgtatatttgattctattattgtttatgtattttggcattttttaagatttcatgaatgaataactccaatttatccattcatgaaatctatattattttttttgtgtatagttattttttatttttagtgtgtgtttatatttttatctatataatatatgtgtgtgttatttttatttttcaaatactgtttgaccatctacttctgtagttaaagcatttaatgctttttctacaaggcctcttcttagggctttttcttctgtagggtcaagcgctggatttccaagtggatgaggtattgctatagttggaactattctattagcccctactgttaatgaaataggtactactgtacacatatgaactactggaagtccagttttttctatttcttttaccatcgttgcaccgcaacgagtacaagtacctcatgtagaagttaatattactgcatctacaccatcagccactaatgctgctccaatttcagaagcatattttttagagtttgcaacagatgtaccattacctacagttgtatagaaagtctcatgtaattttccaattacaccttctttttctaaatctctaagaacatcaacaggtaatactctatctgcatctaaatttgcatacactgggtcatatccaccatgtgcagtttcataagtctcttctgttaaatccataactcctgctatagaataagttccatatttagaagctgaagaagactctattctatctggatttccttttggaactataccaccagaagtaactaaagctattttacattttgataaatcttttacagctttacttgggtcaactctatcaaagtttggcattgggtattcagtttcaaatggttcaccttttattttcttaactaacatgtcaacagctctcttagaacctctgtcttcatggaagtagttaactcttattcctctagctatgtatccttcatctttaggagttccaatttcttctccattagcaagttttactgcaagtttagctatcttaggaagtgcctttctcatacctgctgcagaatcagaagtttctactacataaacatcctttttgaacatatctgctcctggattttcaacatacatacctgttaaagctggtatattcaaagcatcttttacaactttagttattgttccagcagcaaccccatatctaccagcattaaatgcaggaccagctatgaaaagttgtggttcaaaaccttttaccattgataaaacttcttcacttgcactatcaatattttcattgaaatagctatctccacaaactactgttccaactatttcaatatcttcacctaataatttatcaagttgtaaacttattggaggtaaagtttctgccacatgtggcttagtatcagctttttcttctccacctataccagcaaagaactgattaatataatgtactgcttttagttttcccatctcttagtttcaccccttttgcttttaggcattaaaatttacaaaattcttctcttataccagacatttcttcttctatttcttcaacttctaaaaccatttccatcatacttatttggtcttcatatacactttcatcaaataatgattttattggttcctcaacaacgtggtaaacacttaatcctaaggcaactccagcaagtggtccagcgaaagttggatctccagcagttactgtttcggctgcaagacctgcagcttcggcttcagcagcacctagtaaaatcacaacattttcagctccgaatttatcagcagcatctttaactctgttttgattttctaagtccatagccccagcagctgttcagacaaagcattctgtagatgagaaaacaacctctgctccttctactgtttttacacattcttctatcgcaggtcctggtataccatcacggtcacctattataagaacctttttattactaagtaaactcataataatcctccttattatatttctaatatatttttatatatctataacacttattataattatctataatatgttttattaacattactcaatcgtttaataaaatacttcttaatatcctttagcagttaaatgaccaaatcctgtttcattagttgcacctgttatagcttggatttcaacttcaatagttccatcagctcttaaacttccatcagaaccaccagctattacatctactacttctaaatgtccaataactttatctaacttaggaagaactacaacttggttggcatttccacctgttacaacagcatcagctcttacatctgcatctgcaagtgattgagaacctccatcacgtccagcatattcatctgtaactataactgttttaacaccttgcatttctatcttcttacagttcattataaggtcagtatcaggatttccaaaaccttcttgtgaaactataactgcatctaatcctaaatatttacataatttagaagtccagtttgaagatctttctttatctgctaggtaaacattttcattagttataattacacctacaaagtttatatctttaccatgtcgtgcatataagtcttcaacaaccccattgtttatatgaacataacttgggtttttgtcacatgcagaaacacagttaccacttacaattgctccgtccattaattctgttggatataataaagttggtactatttgttttgcatctactccatatacataagtatcatgtaataaaccttgagtctgaagcatgtaaacatatcctacttttggaagctctggatattcttttattgattcaagaagaggtttagtttcatatactgaaacttcatctggagtaagatttcttgctacttctcctaagtacattgctgctttgaatcctatcattctaacagctttttcatgagcgtattgttttaaaccatcaataggttcagctattactactacattatttaatttagaaaatggagtatacttagctccttctccagtcatgtctattataccttcttggaaacctactatttttccagtagttacaacagctacaccttttaaagcatgagtttttccttctcctacagtatcaactttagacatgataccagggaagattcccccattaccttcaacttttactcttggctcaataacatcttttacaggtgttattcttacgctttcacctggacgagctaattctatatctatagatttaatatgctcatctccaccaatttcttgtagcatctcttgcttattgatgaataatactccatcttttacttctgttacatcaccaaattgaatatcttttataaagattttccctaattcaagacgcatacttgcacctcctgttatttaatttgtgtatatgcatttgagtttttctcaaaattatatcattttacaatttatcttatttttttaaagatatattattgtgtttttatgccttaaatctttattttattactaaaaaatatttattgtaaaaaaattattttatttaaaattatttttttaacaaagttggacataaaaacctttttcttcttatcttcagataaaaatagattttttcttttaatgttaatactttatcaacatattaaagatattttttaatcatgttttctatattaggaactgtagcatcatccttagtaacttcgtctactttttctccatctttgtatatagccatagttggaagacctaatactttttgttttatagctaatcttctagcttttgttgtatccatcttacagaattttattttatccccataagtctcagctaatttatgaacatctggcattaaagctttacaaggctcacaaccttcactccaaaaatcaacaaatacaaaaccttctgcatttaaaacttcttcttcaaatgtagccttatctaaatctaacattttcttattcccccttgaaatttttattttaattttaaatattattcattaaatttacagacactatttcttaatttacagattctagttcccaaatttttcatcaatgtatttctcagctactatagatgcaattgcgccatcattagttgcagttacaacctgtcttagagtcttagatctacaatctcctgctgcaaatacgcctggtatgttagttctcatatcttcatcagttattatgtaacctttttcatccatatcaactttacctttgaataaatcagtttgagcatctaatccaacgaacacaaatactcccattgttccatcttcttcatctgcaaagtattcatgagtttctccagtaactttatttttaaatacaactgattctaatattccatcacctttgatttcttcaattactgtatctaataaaaactctatctttggattagcttttgctttttcttcaacactcttagcacatctaaatccttgtcttctatgtacaattgttacttttctagcaaatttagttaaatacattgcttcttctaatgcactgtctcctccacctacaacaaatacttcaaaatcttcaaagaaatctgcatcacaagttgcacaatatgaaacccctttaccagtaagttctttttctccaggacaaccaatctttcttggtgttgctcctgttcctattattactgcttttgctctatattctgccttttccccttttaaaacttttatatctccatctagctcagtatcaacaatgttatctcttagcatttctgctccaaactctttacactgttcaaccattctagctattaaacttggtcctgttgcatttggaactgaccctggataatttgcaatttcatgtgttattacaatttgtccaccagtcttgtctttttctaggattagagtttttaactttgctcttgctccataaagacctgctgcaagcccagctggtcctgaaccaattattactaagtcatacacattttccattttgacttatcctccccaattaaatttctcattttatttaatattaaattagatttaatatttaggctgtttcaataactttttaacaaatttttttattcatactgcattctttgtattgtattataaaatatatcataatcaattactctaaaatcgtcttggacattttctgtccattttggagtctttttattatcctgaaatttacttgcagtgatgattgcttcttcaattaaggttaaagagtttatatccaaacgatttcctttctttagtataacagtcctgtaaggtgtttcatttggttttacactcccatagagtggatgagataaaagttcataaccttcatgtatcaaatctctacttgcttctaagattccaatataagttgtgtctttaaacaaaacttctctgccttgaacttcttcttttacttttggattattcgtaattattatcatttttttactctctttcaaacttttatttattacttgataaataaaaaacaggaaaaacaaatctcccaatttgtcttccctgttaaaatcattttcagagccccgtccaagtacagtcacctttacctgagaatttcatctaatcttttgggtaagtaagattaaacttgtcccttcggtcgctttttataaagcagtctcccatactcttcatccggattattatttttttcagaaaatttaaaattaagcaatttatcctttgttttctataaatagcttttttctatctctgttgacttaagtatataaacattctataaaatttgcaatagtttttttatatgtattttgtatacatttttacttttttttccaaatgttgatattgcatatttcttgtattttcttttttttttaagtacaaatcttttttagtttattttatcaatttagttaaaaacaagactattttcacaacaaataatcactttttatatattttttaatttttcacttttatacaataaaattctcataattttttataatttgctgtcatttatttcatcaaaccaagatttaacatcacctataatagactcaatacagccatcatcaaatggagaatacaaatttcccatactcacaatatctaaaaatgattttgttcctccaactttacagatatttatataatctttccatcctgcatctctatcttgaatcatttttttccaaaattgtaacgcacaaatttgagctaatacataatctatataataaaacggatttttaaatatatgtccttgtttaaaccaccaacaacctctctctaaaaaagaattatcaccatattttctatgaggtaagtattttttctctaaaaatctccagatttcttttcgttttgacttatctacattaggatttttgtaaatatagtgttgaaattcatcaacaattactccataaggtataaatttaattgaagatgataagtgagtgaatttgtacttatctgtatcttctttaaaaaataaatccatccacggccatgttataaattccatactcattgaatggatttcacaactatcaagcgttggaaaattaatttctggcatatcaatccatctagacatatacaactgaaatgcatgtcctgcctcatgtgttaacacatctatatcatcagcagtttgattaaaattagaaaaaatgaatggtgacttataatctggtatataagtacaataccctccagctccttttccttttttcgtttctaaatccataagttcattttctaacataaaatcaaaaaattcatttgtttcttttgacagttcagaatacatccttttaccattttgaattatgtatcttgaatctccctttaaacttgcatttcctgttaaaaattccacgccttcatctatgtaacttaaatattctagaccaattcttttagcttgtttttcataaagctcattggccattggaacaacatattttaatacttgttttctaacattttttatcatatcttctctgtagtcacttctcatcattctaacgtacccaagctctacaaaatcttcaaaacctagttttttagatatcttatctctaagtttaaccaatttatcaaatatgtcatcaaatttagtttcattttcttcaaagaaattataatatgctttgtttgctaattctcttgtttttctattcttagaatacatgaatttccccataccagataaatttcttatattcccatcaaacattatctcagctgaagctaaaagtctagtatactctgaacacaatttattttcttcctgcaattcacttattatttctttagaaaaactttttaaagaatactctactattgtgaaaaattgttctccaaactcttttatcaaatcatatttaaattttgaatttacaatagcattataaaaatgtgaatttaattcttcatacaaaggcatatattcatcccaataatttttttcttctttgtagaatttattaaatgtgtctgtactatatcttatcgaagctatatttgacaacgtttctattttatttcttaataaattaatcttatgtatatttttttgttgctctttataattacgagaattatttatatcttctacacaactcaaaaactcttttttcatactattataattgggtctttcatacttaaactctgaaaacttcatttaaagcactcctttacaactttactttattgtatttataaatatagatttacatgtactatgtaatacttttttataaattattatatatattaaatattctttatattataatcatgttgaataataacatatgattaatggaattacaatattttataacacaaaactaactaatataacaaattaccatcagtctatttattcaaacttctaactatataatatacatttatttatattaacaatgcaaacgataccattatttgtaattaagaattttggaattattgattacaaagtttttacattctcatctcacataagtaatatttttatcaaaaattaatattattaaactttctaaattacttatctcttgatataatagtatacaaaacaaaccatatttcccactgaaactttgttcaacactagctgtgtcaacgttttcacaggaaatttgagtatataatttattggaggttgatatgtacaaattaatcgcactagacattgatggaacaatattaaatacacaaaaaaggattactcctgaagtctttgagtccattcaggaggcaaaaagggctggggcaaaagtagttataacaacaggcagacctcttcctggtgtaaaagaacttctaaatcaactaaatttaacagatgaaggtgattatgttatatgctttaatggagcaattattcaagaagttaaaagtgagaaaatcatacatgatgtagaaatgactttagatgattttgattttatatataataacgtttgtaaaaaatataagactaaaatacacataaatacaatgacaaatttaattacaccaaatgaagcacctggaaaatatacacttcatgaagcgaaattaaataatatagaagtcaaatatatacaaaaagataaaattgatgaatctattaaaatctgtaaaattatgatagttgatgaaccagaaagattggaagaaatcatacagcaactacctaaaaatttattcaataaatatactatagtaaggtctgctcctttttatctagaatttttaggtaaaactactaataaaggaactgctcttaaaacattatgtacgaatctaaatatacctatagaaaatgctattgctgttggcgatgaagaaaatgaccaacatatgataaagtatgcaggtcttggtgtggctatggggaatgcacgtaatagtataaaggaaattgcagattatgttactgatactaataatgaaaatggagttgcaaaggttataaataaatatatacttaataaggctatctaatcatctaaaaaaactaaaaatatacctttagatttaaatacttttcacatccctactctatactaatttatatagtatggatattacctatcatttttatctaaaggtcatttttagtttttcatatatgtatatctatgatagtaccttttgtttgagtttaaatattttatatgattctactattgcctcattaatatctaaacaatatatatcttcatcatcagataatcccgcttcgtttgtccaagcatcaaaatcactcttcgtccagaagaaattcattatatttcagcaactagcagcccaatttagatgcttatcaagatttatatgaagcactcttaagtttggattattcacatactcaatcttttcattttttataattacttctatttccttacctgtagcactacaaatagagtttatttttatatcttggttgaatgtgcaagaggttcctatagcatctatagcacacattgcgctgaaacttctattatctctcaaagttactttatgatttgtttgcaatgctgatacaggatatataaaatttatactattcccatcaacaaccattatattttcataaataaaatattgtagtgtcctttctatatattctttttctatattcaactttttacttacatattcagtcacttcttgaagtgtaacactagaacctttatctattatcatatccataatagagattcttattttctgttgtgtattatccaaactattgtatttttctatttgactcatgtctactcctctttaaacttcataacactttgataaagtatcagttaatttgtttttgtactcttcatatttttggcttcctctaattctaggtcttggaatatctatatttatatcatcaataattcttcctttatctctcgacattactataactctatcactcatatatacagcttcatcaacatcatgagttaccattaatgcagttattttcttctttatccatattcgttctagctcttcctgtaaattttgtctcatttgaaaatctacagctcctaatggttcatccattagtaatacctctggattacatgctaaagctcttatcatggccactctttgtttcattcctccagataattgatgcggaaacagtttttcttttcctttcaagtctgacataaccaaaagttcttctagcatttcttctcttttttcttttggtattttctgctgtttcataggaaatagaacattacctcttatagttttccaaggaaataaagcataattttgaaatataaaagctctatctatgcccggttttttaactcttttatcatttataaaaacatctccacgttctgatttttgaaacccacctattatagtaagtaaagttgtttttccacaacctgatggtcctaaaagacagacaaattgtccatcatctatatccatacttatatcttctaaaacctttgtatgtactctattatttacaaatgtcttatttatatctcttacacttaacttcattaatctgcaaacctccatctacaaaggattttatttataaactttaataccctatctattataaatcctattaaagctgcaaatatcataagcccaattaatacatctgtatgcattaatgtttgagcttgtaccattgagtaaccgagaccggcactcgtagctataaactcggctcagataacagacatccatcctgtacttatagcaatccttgaaccagttagtatatctggaagagatgcgggaacaattacatttgtaaatatcacaattggcgatgctcccatacttctagctgcattataataatcctttgatattgctcttactccttgaatagtatttaaaattatagggaaaacccctgaaaaagctattaaaaatattgttggaccatctcctataccaaaccatactatagtaagaggaacccatgccattattggaacttgccttacagaatctactactggagataaaaccctttcaaaagttttagaaaatcccataataaatcctattggaagcccaaacaataatgcatacataaaacctttaagtactctctgcaatgttataaaaagattagtgactgtctctgcatctgtcacacagaaaaagaaaccttttattacatctactggcattggaagtaacaaagaactccctatatcttttgctgcaaaatgccagactaaaaatataataactaatagtattattttatataaaatatccatactaccatcagtttttttcttagttaatctatcgcttttatctttagaaattttaatttccaattgcttatttcctccatatctatatttcttatattcctgtactcttttaatgctttcttaaatgtagctttattctttaaagcatcaacacttttattgtaaagtgttataaaatcactatatgctttactttttttaaactctttacttacaactaatacataggtatcataatctcctaatttagttgtagattttcttttaccctctaacccaattgactttatgcaatctattacaacaccatctactaaattactttctaatccatatgctagtgcagtccctaataatggagctacttccacattcttgtagtattttttaaccaattctgactggtaatctctattttgaatgactcctatcttttcaggattattatcacttaatagaaatatatcagaattttgaactacagtaccaacaatttcaaatccactatttacatttacatattgttttgcagcatctttacatatgattgctatatctatttcctctgaactcagagcccactgcattgtacttgctcagcaatcattaattgtaaaaatatccattatatcacttacttttatattttcaaagtagtctctatttaccatataatttattacaaaaccagaggtatcatcagatacccctattcttaattttccttttatttcttctttatcttcaaaattaaaaaatattataaatatacttcccaaaataatgataaaaagtattattatattttttatattctccatttatttataatacctttgctttccagtcttcataactcataccttcaggaaactctgggttaactttttcttttataaatttgtcaaaatcatcagctccacaagagtccaataagcttgtatcaatcgtatcttcatatttaggtatatcatctaaagcctttaaatctttatacatttgtaaattatttttatattcttcacctgtaactttccaagtaagagttctaccttctccaacagtcttcttatagatagttctaagtgcaacttcttcttctacattataatattttgcaaatattttagctgcttcagctggatttgtatatatatattctattgcttttgtatgtgctagaaccaatttttttgctaaatctggatgttcttttataaagtttttgtttaatgagaatgaacaacagttatattctttgccattagctttttctttatattgagtagatgctattatttttcctgcaccgtcattttcagctacagaaccccaagggtcacaagatgtaaaagcttgaattttcccagttttaagagctaaatatttatctttgtctgaatccatatttacaacttcatattttgatgggtcagttggtagacctgtttctggaccataatcacttgtccataagaaatcactcatatctgttgcaatttttttacctattaaatctttaggttcttttatatcttttgaaactattaaatattcagaaccaccagtatggttgttagctgctattgttattggtgaacccttaggtattgctccaactaaccccttagttcctatgtaacctgcatccatttttcctgctgccatagcttcaggaactttaccatttccaacagtttttacattaagacctaaatctttatatattcctgccgattctgctactggtcccgcagtcatatggtcacaattataataacctactgttattgtataatcatcttttccagcttttgcttcttctttttcttttggtttactactacatcctgttaatatagatgtacccattacaccaaataagattagtgcttgaatcttcttagataatttcatataaatttcccacctttatgtattatttttatttttagcaacatttgtccatatcttcgccaaataaatcaacaaattttttaccctctactctgtaaatagcatatcctacattaccatttttagaccctgatactattacttctattggtgctttatcatcaatatttttaaaggttatagtttgattctctataggtgctggtattggctttgttatatagtggctatttttatcagaaactacgactaccatttcatttgaattattgctttttttatatataactactaaatcttttttcccatcattatttaaatcttcttcagcacaagttattatgtcttctttataattttttctaaaatattctaatgtttctttattcacatttggaatagaagcatcttctttgatgttatcatcaactatttttgataaaatgattaacacaactactatacaggatattataactatctttttaagcatgatttcctatgacctctttcatctttggtattgttgatttaaatgcaaataaaataattaaaatagtacatacatactcaaaactatcaggtatatttaacattagtttatttgccaactgtattgaagaatttgttgcatctaaatttactgaattattattcactaaaagtaaatttgttatatatccaattattattgaggacagtgtcaaagttacagaatatataataacagttctttttccaataagtttaaacatgcttataagttctggtagatttgtagctgctccagctattagaaatgttatcgctataccaggagatgctccacttgcaacaagggctgctataaacggtatatgtcctacagcacatacatacataacacatgcaagtattgctatacttccaagagatagcaaacctggatttcctaaatatttttgaattatactatttggaaaaatagttgttataaatcctgcaaaaaccatacccattactacatatttactaatagtaagggctaattcaccaaaagaccatttaagaccatcaatcatattttccataaaacttcttttttcttcttctaattctattacttcttcctctgaatcattataaagtgataattcttcttttccaaaacaatttcctaaaaatcctactaaaaatggtactaaaaaaccagctattagataaatgattgtaactttaggacctaaaagacctagacaaagaactacagctattggatttattattggagttgatgtcataaaagcaagtactggtcctaaatatgctcctgaataatacatacttattccaagtggtattactccacaactacatattggtaaaaacattcctgagatagtacttttaattaaagaagaaaatttcttatttccaagttgtttttgaaaccttcttggagttaaaacattgtgaagtacacctgccaatataaaacttatcataagccatcctgatgctccattcagtgtaactatagaagctactatagtatctttaactccatttaaaacaatttctaatatattcatttttgatactcctaatttttaaacttttaattattgtttatagcttctactattgccctttcaattgtatctttatttaatctatcatatttctttttctgatttattattaaagttccttttgttataatcccatatttttttatatacgaaaaatctttccctgcttgatataattttatttccaatttatcagcatacttttctgacattttttttataaacactccatgttcatcacaagatggtcaagtgtttataaattcaactaaaattttagacatttgttcatcccctactttaaacaatttatcttttacttaaaataatccacagaaaataaatttttctatggattgtatcctatactaatttataacgttataacttggtccacacctgcactgcctaaacaagcatataggtttgggaaacatccaattgtagctccatcaaccaaattattctctatacctctttctatagcacattggtcacaagccattattatcatatcagttttttcatgtaatttacttagtctctcgcctactggattacctttagataaaaataaggtattatccataaagaaaaacatccctagaacgtctactccatgagttccttgttcaagttgtggtattatcattttgtctagaattttatgtgtattagtactactaaaaatataagctactttcatttttattccccctatactttttatattttacaaaattttacagatacaattatattataagtttattcttatttatctgtaaaatagatattagctatattattaaaagtgtatatagtatttatctatttttattaaattattgattgatttttttatatttttattaattttaatgaataaaaaatagactccttaaatttataaaacaaatttaaggagtctattttaattaagtttatttcaatataaaacttatatatttctcaaattcttcatacttatatcgagagctttaacagaatgtgtaagcgctcctacagaaacaacatccacaccaatttttcctatatcttctatagtatctaaatttacatttccggaaaattctacaatggctcttccatttataatatctactgcttgttttgccatttccaaactcatattatccaacattattatatctgcattagcttctattgcttcttttaccatgtctaaagtttccacttccacttctatctttctaacaaaagaagtattttttctagctaattcaactgccttcttaacactaccagcagccccaatatggttgtctttaagcaatattccatcagataaattaaatctatgattgcatcctccacctactttaacagaatacttatctaatattctaagattaggtatcgtttttctactatctaataattttgtatttgtaccttcaagcttttcaacatacctacttgtaatagtagctataccactcattctctgtaaataattcaatgctacacgctctcctacaagtaagtttctagtactacctgttaatacagctatcttttcacgattctttactctatcaccatcatttttatataattttacatctacatcaccaagtatctcaaaaactctcttaaatacacctaagccagctattataccatcttgtttgcaaattaaatctacagtagatttagaattttcatccacaatagaattagttgttatatcttcacttggaacatcttctatcaaagcatcctgtatcattctatcaataatcaaataattcatcgccaaaatcctcacttgttctttcaatttcttttatgactaatattttattttctttttttacctgttctatatctatatccatatctggtacatctataaacttaacttttacattatctataactgagtttatatttttagctgctctttttgaaaatacaagcccttcaagtaatgaattacttgccaatctattggctccatgaacacctgtacaactaatttcaccaactgcatataaattttccatagatgtttttgaatccaaatctacatgtatcccgcccataaaataatgttgtgcaggagatacctttatacattctttcgttatatctgttcctctagctaaacattcattataaataaaagaaaatctattaattaaatattcactatctaaatgtgttgcatctaaatacacataaggtaatttatctttttccatttgctcaaaaatagcttttgaaactacatctctaggaagaagttcatccacaaatctttctttatttttatttaaaagtttagctccctctcctcttaatgattcagatataagcattctcctaccttcattattttcttcataaaaggctgtaggatgtatttgaatatattctaaattttctatttttatattatttcttaaagctattgcaattccatcacctgtaagatgtctttgattagtagaatttttaaaaagcccaccaattccacctgtagctaaaactactatttttgaaaaaacatgaatctcttttttagatttaaaaattctagctcctatacatttattgccatcttttaatatatctaaaagatatgcatcttctataagagttatattttctctagttttagcttcttttaataaagttttaaaaacaacttctccagtattatccttactatgaactattcgatttacactatgtgctccttctcttgtgtaatctatctctccattttctttgtctaaaggcataccatattctactatctgccctacattttctatagattcatctgcaagtacttgaactgcttcaactctatttttatactgcccagccttcattgtatcttctacaaaggattctatatcatcaatatttctagcagttgaaattccaccttgtgcaagatatgtattgttgttttcaattgttgatttcgatactactagcacatttaaacttttatctaaatttaatgcacagtataatcctgaaactccacttccaactattaaaacatcttgttctaaattcataagtctatccctctatccttctgctaatttgtgcatgttaagcagtgaatttaaagccttttccatgatttcatcttctacaataacttcattttccatatttttaagtgtactatataaattttctaatgttgtctttttcatatctgtacatagtatttttccaccaggaatataaaagtttttattaggattatttttctttaattcatgtaatataccttcttcagttgctattataaagtctttgtttttactattagtagcatattttattattccggatgtactacctacataatctcctaaatctcttatttcttttttacattctggatgtactaatacttctgcatttttatacttatcttttaattcaattatttcttcagctcttatattgttatggtatttacaatatccgtcccaaaatataaagtttttatctggaaattgttctgcaatatatcctcctaaatttttatctggaaggaatataatttctttattatctatgttttctagtattttaattgcactagaagatgtaacagaaacatcacaatgtgccttaactttagctgtagagtttatataacatacaaccaaagcatttggatactgttgttttaattttatcacgccttcttcatctaccatatctgccatagcacacccagcgttacttactggcatcaatacagttttttcaggtgataatagcttagcactttctcccataaaccttactccacaaaatacaaccacttcttctttacaatctctagcaatctcacttaaataatatgagtcaccaactgcatctgctaattcttgtatttctggtggttgataaaaatgggcaagtattattgcatttttttctttctttagctctttgatttgatatgttaaatctttatccataattgcaccgctttctatatgtactagtgtatatacacctgtaaacccattatatcacttgactattctttcttcaagaattttaaacctcttaatattgttaagatatagacatttatattctcaattgattttccttttttctccatctatttaaactaatttttatattttttaatttttttgtaaaatattatcagaattttgtttatattctttattgctataacattgaaaatattaccaaatacctgtatactaagtacatggttatgtatatgtatttatttctgaaattatattagttgtaatactttatagaatttgtaggttgtccagaattaaattcaatataaatctacacatttagataatatgtatacaaagaccaaaaaattttataaatggggtgatattatgacaacattcttaatcggcttggctatattactaataggaggtgctttatacggtgcttattgtgaaaaagtatttggcccagatgacagaaaaacacctgcacttgctcaaagtgatggagtagactatgtcccaatgaaaaaatggaaaaatagtctaattgagttgcttaatatagctggtacaggaccaattctaggacctatccaaggtatattgtttggtccaatagcattcatactaatacctattggctgtgtatttggaggagctttgcatgactatatgagtggaatgattagtataagagaaaaaggagcacaaatgccttctcttatcagtagatttttaggtaataaagtatttcaagtctataatatattcctttgtcttttaatgcttttagttggtgcagtttttatttatacacctggggatttagttgttactcaaattttaaatatgaaatcgactataaataatccagttgtctggatagtttatggacttatctttctatattacttgtgtgcaacactctttccaattgataaaatcataggaaaggtatatccaatatttggagctattctacttttatctgctgctggtgttggaattggaatctttacacaaggttatgatttagctaatttaagtcttgcaaattggaaaggtattcatcctgatggtattcctcttattcctacattctttgttacagttgcttgtggtatcgtttctggattccactcaactcaagctactcttatagcaagatcagtttcaaatgaaaaagaaggaaaaactactttttataatatgatgattttagaaggtttaattgcaatgatttgggctgcagctgctatgggtatttacaataaaggaatacctaaggaattagtaggttctcctgatgtaataggtttggttgcaagagatttacttggttctattggtggtatcatagctataataggtgtaattgttttaccaataacttctggagatacagctttaagatctttaagattaatgcttgcagattactttcattatgaccaaaaggaaaagaaacatcgtgttatattgtcaatctgtatatttattcctgtcatagccattcttatatttgcaaagcttagtgcttctggatttaatatattgtggagatacttctcttggagtaatcaaactattgccatatttgcatttgcaatgattacagtttaccttataataaaagaaaagaattatattataagcttaattcctggtatgttttattcttttgttatattcagttatatatttaatgctcaaattggatttaacttaaacataaatatatcatatgttttagctgccatatttactgtattatatgctattttaactgtacgctctggtagaaagttaaaaagcaaagcggatactaaattggctgactaaatctaaataaaataatacttagaataaattttattaaaaaatgataaaaaagtaggcaatctcaagttagatttgcctcttttttatttaatacagtaataaatacttaagtatttactccttattggaatatttatcctaaatctctaatataaataaataaaagttttaaaataatctattcatttatatacttaaaataaattttttggaggaatacttatgaataataaattacatgaacttgaaaaaaatctaccagaaacatcttgttctttttgcacacatctttcatttaaggggcctagcctagactatagatatgatattagatgtgttatttcagatacaaagcctgattttagaggatgttgtgaatattttgaaccagaatatacagaattaaatacaggagatttagacaatctatacataaactttcttgagacatgcctcaaggtaaattataatgattacatcaattctatgtattggaagttatttaaagaaagaaccctactagaaaacaattttaaatgttctatatgtggatcaactgaaaatgttgatgtgtatcatgttaataaaaatttaggaagggaaacttccaaagatgtagttgttaaatgtgataaatgtaattgtaaataagtgtataaaatttagataacttcacataataagtttaaataaaacttaggaggttatttatgaaaaataataatttaaattgtgctgctactaattgtgcttataatactagtggatattgttatgctggtagtataaaagtagatggaatgcaagcaactactacagaaaatacttattgtgcttcttttgaagacaaatatacatctggtataactagtcgttctaatgaaactaaccaagttgatacagataacattcattgtgaagctgtaaaatgtaaatacaataaaaatgaactttgcaaagctgaaaaagttcatataaatgaaagaaatgcaagttgtgaaacttttgaaatgaaataaatttctttttatttaattctatagtatttatacaaagcaaaattgaacctatcaaatagatgtctttattaatgatgtctatttataggttcttttttaaaacaattcataatttatatataaaaataaattattattttaatatattacctagaagtaaatttaacacccagaatatccataaggaacataaatattggaactccaattagtaatccccatacacctaaataatgttctcctacaagtaaaataataaaaacaaaacaaactggaagtttagttctattcgacatcaacttagggtttaatatgtatgtttctactgcatgcactatacaaatcataagtaaaactccaaaaacctttgttattcctcctgtattaaatgctattacagttaatggaatcaaagacactataactcctgctactggaataagacccaacacaaaaatcataaatcctaaagcccatatttgagggaatcccatgaaacctaagaaaatcatagaaacaacagaatttataaaggcaatcataacttgtactttcattacttcaccaaaatttttaacaaagctctttccaaaaaatacaagcgaattataaataaaagaaatcttactatcagaaagtttatctccaaaatttttaatttcatttttttcaagtaaaaggagtaaactcagtaaaaatgccaataatatatttactccaaaacttccaacttttgttgctgttgatgctataagtagccctgcttgtgaaatatatttattaaaatccagctttgagacaataggatacaattttggtcctaaagattgagcaaattgatttacatcaaaatcactaaaaaccctactcagctctgtaagttgaactataattattggtacaactgcatagctaatcaatactaacaatatagcaaatagtgcatataacactataattatcaatgaatctggaatatttaaagaagaaaacttcttaattcgttttcttgtggctacaagcaagttatagaaaataaaagtcataataaatgttaaaagcaccatatttaacatataccaaaatgtaattagaataattactacgacagatatagaaacaattttatattttgaactatcacgtgccaatcctttgttatcttccatagtttaaatcctccccaaatttttatgactttataatgactgccctttttattttaatctcaaaaaacaagtagaaaaatactaaaaataacttattaattttcataaaacaatattaaaatttagagaagatacattttaaataatcttacttatactgaaatctgctctacatcatatatttaatttattattatctatctcatatagcaattcgtacatctctggatattcaaaaaacaaaccctcttttagtaattgtcttatttcatctgtgcttacccactttatatcacttacttcttcctcctgtaaaatagctttggatatatcatattcttttttaactaagtatacatcccaaagagtatcttcatgaatcatacttctaaaaactttcatctcatctttagttatatctatccctatttcttcctttgcttcgcgaattgctccttctaaactatcttccccagaaacaatacatccagttgtcattccccacatatttggcaatgtctttttacttttagaccttttctgaattaaaatttgagagttactatttaaaatccacacttcaactgccaaatggtaataaccttcttcaatagaattacctctttttataacatttcctgttttaattccatcagcattatataaatcccataattccatttcaaaatctcctgactttactataaattagataaactacaaatatattttagcataattaattctgctcattttttattacaatacttgatttacatttatgttcattgcttctcttttccttccattctcttatatcatctataataaatctatgtttcagcaactttgtgtcaaatttaaatattctaaacactatttgtaatacatatcctaaacctaaagcacttacaagcgtaccaatacctacagaacctcctaataaccacccaacaactaatgctagtatttcaagaattgttctaacaagacgtacagatttattagtttttttctgaagagcaatcataagcccatctctcggtccacttcctaaacaaacacctaagtatagaaaacttgctatagctgccaaaataattcctataacaaccataaacacacctatataagtgttgcttgcatgaggtatcactccagaaaatattactaaatcaataaaaattcctataaatgtcatgttgagtaaagtaccccatcctatattttcaccaaaaactgcatccaatataacaattacaactcctaccattatagaagcctgacctatagttatgcctagctttatagataaaccttggtgaagtacatcccaaggcataagacctacatgtgcattaatcataagcacagaagaaattgcaaatataaaaaaacctgaaaataatcttatcatactttttaaacttatttttcccatcaaaaatcactcctcataataataataacaataaataccaataaaatatatatataaatacgaaattttacagaattatttattagattaagataaaattttaattataaaaagtggcaatccaaattttatacattttcacctatactctaagctttcgtgtataaaaaacggatataccacttttttagtatataaacatttttaatttttcttattaattttcactataaattctagcttcttcttctccatttagtactcttaaagttccaaaagcaagtgattccaactcattttctcctgccataatttctactggtgctataaactcaactttctttttaaccattgaagtaaacatttcagaatatgcaattccacctgttataattatagcatctacctttccatctactacagttgctaactctccaataccttttgctaactgataagccattgcttcataaataatttttgcttcttcatttccttctgctatcattttttcaacttctctagcatctacagtatttaggtatgaaactataccacctttacctcttatctttttagtcatttctctttctgaatattgacctgaataacaggcagccactaattttgtagcaggtactcttcctgacctttctggagaaaatggtccttcatcatcagatagcatatcaaccattcttcctttttcatgaagataaatacttactcctccaccaatgtgagctactattaagtttaagctcttataatcttttcctttatccttagcatattttaaagccattgctctagtatttaatgcatgccctgcacttgatctatccattccacaaagtccagatattctcgctacatctataagctcatctactgcaacagaatcataaatatatgagttgattccaagaggttctgatattgcatgtgccacaacagcacctaaattggaagcgtgttcaagtactggtctatgtcttagtacatcaatcatttcttcatttactagatatgctcctgattttactggtggtaaaactccacctcttcctactattgcactaagagattttaagtctatactattttctttaagaatattcaaaactgcttccttacgcatttcaaactggtcttgtatagtattatattttgcaatctcttcagctggatggtctatcgtcttcacaagaatttgttcttctccatcatatactgctatttttgtagaagtagaacctggatttatggctaatattctgtaagtcataattttcttcctttcaccttaatttctatagtctatttatatctattataaactatttgctaaccatttccataccttcatggaaagcttttatgtttaattcaacaaattttggtttaacattttcacttataattttttcccaatcaatagactctaattgcatagatttaactagacatcctaataaaataacattcattatttttgaatttcctagttcttcagctttatcagctgcatttataacttttgcatttaatctacttaactctgcatctatatcactttcttgatattcagctcctccgattaaaacagtcatagaatctatcctatgattatttactaaagcttttccttctggttttaaataattgaaccatcttaaagcttccattttttcaaaagatactaatatatctgctccaccaatttctataactggagaatgaacacaatctccatatctaacttgtgaggaaactgaacctcctctttgactcattccatgtatttcactcatctttacatcatatccagcttccatcaatcccatagttaataatttactagcaagtatagttccttgacctcctacacctaccaaaagtatactcttagtcatattatttttcctccttaactattgcttgttttggacaaacttgtgcacatactccacatcctacacactgatttctatctatatttgataacttattctctttatcaaatgatagagctggacatccagttttcaaacataatttacatcctatacatttatcatggtcaactttacacttagtcttaaatggattattaaattcttctatatcttctttagagaattttttaagtacacatggccatcttgttattattactgatggttcatcttctatagctaaagcccaatctagtgcttcatttacttcttttaaattgttagggtttataactcttacatgttctattccacaagctttaactaatccttctatatcaacttctttagttttagcaccttgtaaagtataccctgaacctgggttttcttggtgacctgtcattccagttattctattatctaatataaccgaaatagaattacctctattgtaaacaacatctaaaagtccatttattcctgtatggaagaatgttgagtctccaagtacacctaccaatcttttttcattatcatccttcatattaagaactttttgagctccatgtgcagttccaaaagcagaacccatacaaacaacataatctattccattatatggaggagcaaatccaagagtataacaacctatatctccaccaactattaaattttttctctttccaagttcatagaagaatcctctatgtggacatcctgcacagaaacttggtggtcttggtgttactaattcagatttgtattctatagtatcatttgtttttccaaatatagcttttcttaaaacatctggtgtcatttctccatatggtggtattacatcttttccaatacaatctattccatatgcttttatttgttcttctataaatgggtcattttcttctataacatatattttatcaactttttctgcaaattcttttattttttcataaggtaatggatttgtaaatcctagtttcatatatgatgcattttttccaaaaacttctttggcaaaattacaacacataccagaagctataacacctatttttgtatcattcatttcatagtagtttaaatcagtttcatttgagaattttttaaggatttccattctttcttcaacaacgccccttcttatttgagcatttgctggaacagttaccattttcttagcatttttaacatactctttaatttcaacttcttctctatcatagcactccactaatccttttgaatgacaaagtcttgttgtaactctatataaaactggtgtatcgtatttttcactaacttcaaaagcttcttttatcatatctttagcttcttgactagttgatggttcaaataaaggtatctttgcaaattttgcatacatcctattatcttgctcattttgagatgaatgcattcccggctcatctgctgtaataagtaccataccaccatttacccctgtatatgcataagtaaatattggatcagctgcaacattcaaaccaacatgtttcatagaagccattgttcttgctcctgcaattgaaccccctatagcagcctcaagtgctaccttttcgtttggagcccactctgcaactattgcatctttatatgttgctatattttctaatatttctgtacttggagtccctggatatgcagatgcatatttaacaccagcctcataggctccacgtgcaattgcttcattacctgtcatcaattgtttcatataaaattccctccatctacaattattaaattcatagtccacccaatttgttcaatgaaattaattatttatttttacttctaaactttcaagtgcttcttttataatacttggtgctttcttacatttatcttcagaaactgcacaaactgcaaatcttaagcccatttttaatggaactgcaaataaattatgtttagtcaattcttcacatacttcttttggattatcacatggtatacttacaaagaaacctgctatatatggaagaatttctaatcctactctttcagcttcttctacaaatacatctgctcttctagtaagcatgtttttgtatatttctttttcatcctcatattctttgaattttttagggtcatttacaatgttagataatactgccatggcacttctattacaatttgaccaatttgctctacatgaatgaacacatgagtaatggaactcttcagctacatcttcacttgaagatatacaaattatagcccccattctcataccataagctgtaaatccttttgacatactgaatccaaccaatacgagaacgttttcaggcaaattagaaaatttcttaaaaaactttctacatacatcatcatcacctgcaaagtcaatatatgctgaatctacgaaaaatattatctttttgtctttatcttttgcgacttcttttgataagtctaatattttatcccactcatcatctgcaacactatatccagttggattatgcgctggtgtgtttataattgtaaagactctaccttgtttttctgctatatttacaaatttttctttgaacgactcaaaattaaaccttctattttcatcaaaaagttggtaattaactacttttctattagcctcttcagctatacttacatatggactccaaaaccaatcagatgttaatacctcatctccttcattagtatagttccatacagctaattttattgcaccacttcctcctggtgaagctaatactcttatatgtccttctggtaagtaatctctgaaaaatacttttttaactgcttctaagtagtctggttgaccttcaagagctgcatatgcacctatctcacagttatctaatgctttatattcttcatatacagttttcattgttattaattttcctgaatcatccattagagcgcctattgttgcatttattacattatccataccaaaagccttctctgctgcttgagctctaccagatatgctaaatataacatcattttcttttggccacattgcatgcttaccaaccatactttgactcataccatcacccctaaaattgtatttactcttacattatatattaagcaattactatgccaataaatcccactttatgtaaaattgattttgtttagaattattatttttttcattattaaattaagtgttttaactatttttcttataaatatatatgcctgtctaaaaaaataaaaatttacaaaaaagtaatgttaatttttcttaacacttgttttaaaaaattaacattacttcaaaataatttatatgtaattatatttaaatatttttattgtatttcttccataaagatgtcctgcttattccaagaacttgtgcaacttcatttttagaaagtccctgagcaaaaagcatacttattattttttcttcaacatacttatttacttcttttatatctatacttatcttaccatcatttatcttacttatatttatagattcatcttggacttctacacttgctgtcgtttcagaattaaatttgtctacttcagagttaggaagtaattttttagttttaaaatctctatcttgtctcaatttaattttacctgtcacaacatatttttgagctattgtctttaactctcttacatttccaggccagctataattatatagcttatccatttcatctttagtcaaaacaaaattttcatctatactgtttattccattgagaccatcatcctttaatacttcatttacaaaattgttaaacaaaggtattatatcttctcttctgtctcttaaaggaggtatatttatctctaaactactcaatctataaaataagtctgctctaaatgtacccataactattttttcggttaaagattcgttcgttgctgctataatccttatatccagaggtattatataatcagaaccaattctcattatttgacgttcctctattactcttaatagttttgtctgaatattaaaggatagactatttatttcatctaaaaaaagagtccctccatgagcaagttcaaatagtcctctttttccaccctttctagcaccagtaaatgcaccttcttcatagccaaaaagttcactttcaagtaaattttctgctatagtagcacaatttatagcaacaaaaggcctatcttttcttttacttatattgtgtatactatgagctataatttctttaccagacccactttctccataaagtaaagttgtataatcactttttccaatttttttagcttcttcaataaattctctagttaatttatctttaaataaaaaatcatcaaaagtatatctagcatagagacctttttgattcaagtcaaatcttatttttctttctaagttttgtagcttggttatatcttgtattattcctaaaactccataagtactattatcaacttttattaatgttgtcctagtattaacaattagattatttatatttcttatctttctatcttctacatcctctttttcatgtaaacaatctaacatccactccattttaggaaatacatctaagatgtatttattaagtgcacattttctctctactttaagcatgttttttgcactttcattgtacaaaattatactaccattactatctatagcaattactccatcttttataccatcaagtatatttcgtaacacttcattattaaacttttcttcacctaatgtatccaataattttttacaatattctacagcttctcttatagattcatcactagcagttgcaaatacactatcaattccatattgccttgcaaaagaacatgccaaacctcctcctacgattacaacttcatctttttggtctatatattttacaactttacttcttatctcatacttagattcaaaccattcttcagttatttcagtacttatgacatttctccagccaacatagtcaaaagaaacttcattgtctccaagaatcaatactacttttttagaatatttctttgctatttctattgctcttaaaaggtcagttgacttcatattcattggtataacaggtacatttactgtatctattactaaactataacctccacctctaccaattatagcttgggcacctttttcaacaagtatacgaccttgattttccattaagtctaggttaagtatgtcgattattatagttccattttctacatcttctctatataattcttctattctttcttttaattcaatatcagaggctataattcctattttttttcgcaacaaaatcacctcaattttaaattataatgtattgatttctacctgctttttttgatttatataggttcttatctgcatcttcaattaatatttcaacatcttttctactacgacatctttttatacttactccagcacttatagttatatagttttttattttagaatatatatgttcaataccctcaaattcaagaagtttgaaaactcttttaatatataattctatattatcaatctcttcaacaccgattgattctatagaatctactagtattaaaatttcttctcccccatatctgattatatgttcggtaatatctataaatacacttcttataatatcagttaccttaactataactttatctcctgctagatgaccataattatcattataacttttaaaacaatctatatcgactagtattgcaaccatatttttgtctctggttccattaaataaatccaactgctgttccaaatatcttctattatatagtttagtaagtccatcttttaaaatatcattttctaatttcttattatcatccactagtaatcttaaactctcttgtttttgtctgagttcatattgtttgtgaattgcttgagatgttttataggaattatttttttcccacctatcagaataccaatccatacttttataatattctattgccagtttaaaatctttttttagctcatatccatttgctattagcccataaaatatagatatttttctaagattcaatgaactctttttaactaaatttaaaccttttatataacaacttataccttcatctatattaccaaattttatatataaatctccatacaacttatatatgtaatctagtttagaattatatataaaaacatcgccaaaacttttatatatattttttgataaaattaaataggtatttaccttttcaaaactacaattatctttccttaactcaatttcagctgaatataaaaatataaatgaatataaataatccttatatacaccttcaacaactttcattaattttatagtctttaataaaataacttctgcttctttattcatatcttcttttaaatatgcccatataaggtctatctttatagacactctttcagttactgatattgagttcttactgtgcgcaacatctaatacattatttatgtattttatagcttctacattatttccactctctaaataacacaaacttattatacatttacaaaaagcctctatagaatataaattattttcttgagccagttttagacattcaattaggtactccatactttttataaagttattaaataaatatagataaactctcccaaatatataatttgccctacttacaagagctttattttttaaagttttaaaaaaagacacttcttctactaaagctattacatccgttttggtctgatataaagcacttatttctacacataaactcatatttaacaagactagcaactcatttaaatgattttgtcttataactttttttgctgagaaataaaaattatttgccttatcatattttcttatagaaatagctgataaagtaagataaatataaattttagatattatatctgaatcttcttttaatgacaattttttaatatactttaatgactctatcaaatagttgtatgatgcttctctatctttttttatatagtttataaggctaattaaatataaagtatagactctactattatcttctagttttgtatttaaaaggtctttgtgataatccaagatgtagtttaaatctgtcaaatttagatagaatttagtcaacatatcgtattctatcttgtttatatttctctttaaatcttctattaaactccttttcaagtaaatcaccaatcctatttcaacagttaaaaattcttaaaatcatgataatgcaaacatctatttctaccactttcctttgctttatataaagctttatcagcattttcaattatttctcttatatctatactactatttttacatgtatcaatgccaatactaactgtcaaattattgtttaaaaatttctttacaatcctacataattttcttccaaatattttgctttttttataatctttacatacagataatatcagaaattcttctccaccataccttatcataaacatgtctttttttagatatttttttattattatagttatatttttaagagcaatatctccattatagtgtccataagtatcattgtattctttaaagtaatctacatctatcataaatgctgtgcaatattcactaacttcttgtttttctaaaaaatcgttcaaaaaagttctattatatgcacttgtcaaatggtcaacatatttttttttatctaaatcaagttttacttttctcatgttatttatttctgtttctatatactcatgtctataatttaaggaatctatataatttctatttcgagcttttatatacatcatttttaactcataatacattttaaagtatttcatactcatttcataattttgaatcttttcaaaacacaaatatatattcttgtatgctaacttcacataattataatttttagcatttttagatttttcaaggagttttttatttgtgtttaaggcattgtcataatatccaaagatataatatatctttgcctgatgataaattatttctaaatcatatattgtatattcttctatattttttatcatatttaagatgtttttagctctatctaaatagcatattgattgttcaaaagatttttcattactttttgcataatacatagctaaacttataaataaatcaaacttctctacttcttttaagctctgatttttaattttttctagatatacttcagattttgctaaattatttattgctacaggataatttctagtctttattaatattttagttatgttgtttgatgctctatatttttgaattatatttacatttctatactttttattgcttattacttcattgaaatattctatggaacattcataattttcaaatgaacattcacactcacctatctttatattacatagtgaagatacttgcatatcctttagtaaatctgcatattttcttgcttttaaaaaatttactttagcaattagagcatcatccaaaaacaaaaaatatattttaccaataataaaaaaatatatttttttacagttaaaatcgttaatttcttttatctttatatacaatgtttctatttctttaattattacagaagattctatacacttacttgccttaatgtaaataagttgtgatttaaaaataatttcttcaattagaaaattattttcatcacaaataagattaaatttatccatatataaatttgccttatttacatcttcattttttaaacttaaaatagctatttgtgaataaaatcgtgctaaaaatttataatctttgggtaagcatttatcaatatatttacaggaaatcaaaatatactctttcattttttcactaaacccttgaataccatataataaagctagcaaaaaatttgattttaataacattaaactattttgttcagttttatagcaatcaattaaattctttactacaccaattttattttcaacaaaatcgttattagtcaataatctttcattcaaggttagtttaaacattgaatctaaaattgtatcatctatctcttccaaatatttactatatattgtaactcacctccgacttacattatctcataaatttagtaattttccatactatttttgaaaaaaattgatgtctcaatttagaaatttctcttaaattaagacatactttacactaaactatacaattttctatctgaactatataatcctgacaattttcacaaattatcacacttacaatataactattatcaactttatttgcccttgatagtttattaaaagatagtcctttataatcaacagatatattgcttattacatattctccatctttactgaaaatataaaagtgatattctaaaaaaggaaagaattttttcttttcttttactccttctaaacataatggacatgcttcttgataatattctacatcaaaatcaacttcttctgcttcattaagtatatcaattatttttgaaatacttactccttgaactggattttcttcatcatttattaaagcactacagttctcctcttttaataaatattccttatcatcatatataaacttgtataaactcatattatatcctccttataattattaatctccaagttattctaccacttaaataaagttaataaaagtaattgtttataatctttataattaagttatgtatacatatattcctatacactatcttaattaatgattttaaaatccaagtttacactttgaacatccagtttcccaaaatctattgtcaaaactcactttagttattaatataaggatataaatatataactgcatagatgttacacacttaactatttaatatgatacgatttagtatctaaatttatatattgtatatagggggagatatatatgtataaagataaaagtgatgaatgtatacacttaatgactgcatacatcgatagtataagtggatattattcatttattgacacacaattagaagattttatggtgaaatatggtgaaaacattgttgattcaaatttacacagtataatgatgttgctttgtaaatggggattatcttagcattttaagaaacttttttgtatattgtattctatattatttattcattaataaaaaaagattgacataaacttaaaagctatatatagatttctttaaaaatctatatatagcttttttaattttttcaaaatgtatacttaaataagttagttttttttcaaaatttgactatctaatatgatataatttaactatctacaacaataaaaaatatctaatatgtattatctagtttagctcatcataataacatccctatatttacaattaagatattttcaatatagtaatactcaattttaatattataaaaaggagagattttgtatgaattacaatgacttactaaaatcagctagagagaactttaatggaacatgtaaagtatgtaaaatttgtaatggattagcttgtgctggagatgttcctggtatgggtggtaaaggaagtggttcgtctttcattgaaaatagaaaaagtctagaaaaaataaagataaatatgagagttatacataatgtttcaaagccagatacatccatagaattatttggtagaaaaatgagttctcctatattcgctgcacctgtatcaggtactctattgaacatgggtggtaaagtttccgaaaaagaatacatagagcctgttgttagaggttgttctaattctggaatttatgctatggttggcgatactaatgtagatacttttttactggataatttagatgtgttgaaagataatagtggaaatggaattgtatttataaagccttggaataattcaaagataatagaaaaaattagattgtctgaagaagcaggtgcttttgcagttggtgtagaccttgatgcttgtggacttattaataatcaatttcaagaaaatcctttttctcctaagacaattgatgagattagagaattggttgaatctactaaattaccttttattataaaaggaattatgactgtagatgatgctttgatggctgtagagtctggtgctagtgccattattgtttcaaatcatggtggaagagtacttgattatactcctggtacttgtgaggtacttccagatatagctaagtctgtaaagggaaagataacaatacttgttgatggtggagttaggactggtgttgatgtagttaagatgcttggattgggtgctgatgctgttttgatgggaagaccttttgttactgcttcttttggcggtggtcttgatggtgtggagttttttatagagaaggttaggaatgagttatgtgagactatgattttgactggttgtcaaaatgttaaggatatagatggtagagttatatggaatttattgtaaaatatttctagactctaagatactgattaatatattctatataaaaaagttgtcgccctatttcttagtgcgacaacctcttttctaataacgctctccgacagcttgccaagtggcttttccaacaacaccatcttttgttacaccaagtcttccttgaagtatttttacttgattatatgtagcaggtccaaatttactatctggatcaatatcagaaccatttatttgttgacataaaagttgtactaaatgcacaggattccctttttctacatgtccatatcctactacagtggtatttatatttacgctataacttataggaccagtagcatcaaaacgatttaaatcttttttatatctaataataaatgcttttggttcaatattataatcatctatattaatattatatgaatctataaatttttcattaataaagattgtatcatctttagatggatttatatttaattctttacatttttttcataatcagattttataggttgtggtacattttcataaataaattcgtaaccagttattgtaaatgaatttgttgtttgctcttcattactttttcatacatttacatcattattagtatttgcaaatactaaactaatagatattagagtcaccctccctgtgactactaagattttttttagatttttaatttcaaaacttctcctaatttgttaataaattataatactataaaaatctattaatttacaactctcatgctaatatcatcttcttccttaagatctgcgcctgttttttctaaaatccctatatttcttaaataatttgaattatcaaaactaatactttcaaaattaaaatatgtaactgaaaataatgtaaacaaaatcaataacatcaatattccacttttcccttttttcttaataatactatcaagtctcttttccaaatttgtcttattaaattcagttgttaaaataccactattataattcttactaagtttaattgactttataagtgctaacgcatatgctttcttatcttttaaagagcaatcagtcaaaacactttcatcacaacataattcacaatctagatttactttattgctcattatataaacaagtggattaaaccaatacattattttaacagacaaaactaaaaactttattaaaatatctttgtttttaaaatgcattaattcatgtttcaaaatccaagttaactcatctttactataagtatagtctggtaagaatatgtaagatttaaataatcccatacctgctggacttatcaattcatcagaacctcttaactcaattttcttttttatgtctaattcttttaacaaatttttatagatacaatttacatcatgatcttcaatatcataagatacatcaacaacgagatttttaaattttgtgtattccataaatgtataaactgcaatggctatagttacaaataaccataaataaactaaatacagcataaaatcattatctatagaaacatcaatttgtgtaatattatttcctactgtattttccttgggctcttttacttcatacattactgtataattaaatagaaaaagtaacattctaaagactattaccaaccaaatataataattaaatctcttactaaacctcttaaaaaaatatcttttcaaaaataataatagacaaataccaaaactacatacaatagttgtctttataagattgtcaaaaacatatagcatataattattcattctttaaattatcaaaataactttctaaaaaatctagcgtgtctttacctatattttcatcatcatgtaatgctgaaattaagcttttcaaagaatcatcatgtatattacttaggaaatcctttgtctcaaaacttaaataatctttgtgttttactattactgtgtaatgtgtatatctgtctattttttgagcatttaagaatcctctttttactaacctcgataaaagtgttagtgtagtggtttgtttccaaccatatttttgttccataacttcaataacatcttttgatgtcactgtagcatctactttccaaataaatttcattacttttagttctgcttgtggtatttttcttatcatcatttacacctccctcaaaactcttgctactttaagtctacaatatgtgaattttttagtcaaacgctttatgaaaaaatgtggatttttgtactttttattaattttctaattttttaaaatactaaaagttagattttaaaatatagttgttcaagtattttgctttttacatatttaattataatagtgcagaatgttatttccacattaaaattatttaataaaaattcctatattttcacacaaggaatattataatacttttttttaaataaactagagtaatatctaataaattttaacaatctcctaattgtacctttgtgttattaaaatatctgttttatataagtttatgttataagtaaaattatacatagcaaataaaggtataaaaacaccattttcagtgtctttaaaataaagtttgtattcttctaaaaagttgtgataattaaaatatcactactatacaaaggaagatgttcactttttatgtttaacaaaaactaaaatattaaaaaaatttattgaagaatatgatgccaaaacaattacagatattcaagatatactaaaagatttatttgaaagtacaatccattaaatgttagaagcggagcttaatgaacttttaggttatgatagaaaatgatatattaggaataaaaaatcaagtgattggaatatactcaaaaggcatgtctactcaaaatatattaagtcatcttaaaagtacttatggaattgatattatctcattcactaataactaaaactactgataaagttattcctttaactcataaatggtaacttagacctcttaatataatttattcaattgtatttatagatgctatacattataaagttagaagtgaggtcgaataataaacaaaacagtctatatagctatatgtagcataaaagaggttttaagaatatggattggagaaaatgaaatttcaaagtattggctaaaagtgcttatagatgctagaaacatgggaattaaagatgtattaatagcagcttctatagatagactagttgaattttctaatgcaattaaagcgatatttcctgatacttaagtacaaagatatgttgtgcatcaaattaaaaatactttaaattatgtatcatataaaaatagaaaagaatctgtaaaagatttaaagaaagatatgctacaattacagaagaggtagcattaagtgagctatcactagagaaaaaatagtacaatcaatatacaatagtattaagaggttggtgaaacaattggaatgaattagtaacatattttaagtactctcaagaaataaatacatcgatatatactacaaattcaatgggaagttagaatagattattaagaaaagttactaaattgaaatctatttttactttggataattatttgcacaaatcactatacttaacaaccatatatatttcttaaaaatggactcagaaaattagaaattgtgctcaaattttagctcatttaagtatttattttgaagaaagaaatttttcaaaaaaacaagaaattttcttaaagggttaatagcttttgcaaaaatggaaaagatatcaaaataaggctatgatttttaaagccatagccctattagtaaaaatttaattatcacttaaaaaataaatttttatttaaagaatacatgtaaatgtttacagattcagcaatttaaaattatctgtgcaatagctttctttttaaagacgtcttccagctgcatcccaagtacttcttccaacaattccatctcttgttaatccaagtcttccttgaagtgacttaactgcattatatgtagcaggtccaaattcactatcatcatcaatacttgaaccatctaaggttctacataaaagttgaactaaatgcacaggattacctgattcaacacgattatatccgactacagtattacttacatttaatgtataactcttaggtccagtaacttcaaaaacataaccttttttatatctaataatatatgcttttggctcaacatagttttctacatcatttgcatctatagaatctttgttaacaaaaattatatcatttttagatggttttatatttagcgcttcacattttttttcataatcaaattttacagattgtggtgcgttttcatatgtaaattcataaccagttatagtacatgaacttattattgaatcatcatcctttgatgtatctacatcagtagtagtatttgcaaataccaaactagtagatattagagttagacaacctgtaattattaaaattttttttaaatttttcatttcataattcctcctaatttattaataatacgacaatataccttttcattacatacattaatctattaatttataactctcatgctaatatcatcttcttccttaagatctactcctgatttttgtaaaatccccatattccttaaagaatttgaattatcaaaactaatactttcaaaattaaaatatgtaactgaaaataatgtaatcaaaatcaataacaccaatattccatttttaccttttttcttaacaatactgtcaagtctcttttccagacttgtcttattaaactctgttgttaaaataccactattataattcttactaagtttaattgactttataagtgctaatgcatactccttcttatcctttaaagaacaatcagtcaaaacactttcatcacaacataattcacaatctagatttactttattgctcattacataaacaagtggattaaaccaatatattattctaacagataacactaaaaactttattaaaatatctttatttttaaaatgcattaattcatgtttcaaaatccaagttagttcatctttactataaggatagtctggtaagaatatgtaagatttaaataatcccatgcctgctgggcttatcaattcatcagaacctcttaattcaattttcttttttatatttaattctttcaacaagtttttgtagatacagtttacatcattatcttcaatatcataagatacatcaacaactagatttttaaatcttgtatactttataaatgtataaactgcaatgactatagttacaactaaccataaataagctacatacaacataagattattatctgtagaaatatcaatttgtgtaatattatttcctactgcattttctttgggttcttttacttcatacactattgtataattaaatagaaaaagtaacattctaaagactattatcaaccaaatataataattgaatctcttactaaacttcttaaataaatatcttttcaaaaataataatagacaaataccaagactacatacaatagttgtctttataagattttcaaaaacatatagcatataattattcatcctttaagttatcaaaataactttctagaaaatctagcttatctttacctatattttcatcatcatgtaatgctgaaattaagcttctcaaagagtcatcatgtatattacttaggaaatcctttgtctcaaaacttaaataatctttgtgttttactcttattgtgtaatgtgtatatctgtctattttttgagcatctaagaatcctctttttaccagcctagataaaagtgtcagtgtagtagtttgtttccagccatatttttgttccatagcttcaataacatcttttgatgtcactgtaacatctactttccaaatgaatttcattacttttagttctgcttgtggtatttttcttatcattatttacacctccctcaaaactcctgctaccttaattctacaacatgtgaattttttagtcaaacactttatgaaaaaaatgtgaatttttgtactttttgttaaatttctaatttttttacaatattaaaagttagattttaaaatatatctatttaaatattttactttttacatatttaattacaatagtgtagaatgttatttacacattaaaactatttaataaaaattcctatattttcacacaaggaatattataatacttttttttaaaataaactagagtaatatctaataaattttaataaccttctaaattatgcctttatgctattaaaacatctattttatactgattatttacaaatatatctaaattaattataaattttattgaataagacttttataattatacctttaataaattataaaaaagcacttttataaaaaaatgtgcttttaatatctactaataaagttctttattttaattaaaacataattatattttagtattataatcttttaattttagcattatagtttatgtattataccctaatatattttattttaaattactagttaatcactcttttctggttatttatctcctatatattaaagtgtcacacctaaatagttaaatcattatcctcttttatctttattgcctttacaaatccatctgcaattacaaaactcataagagaagttataaaatatacaaatactggaacagtaaaataaaatccaaatcctaaatctaggaatctcattccttttccagtagtaccaaaagttgaaataaactccattatagagtttaaaagcaaaagatatccaataatcctaaatctttttacattatcttttacaaataagctatgttcagaactacttaatacttctatcaatgattttataatgataaaatatgatacacctaaaataaacattaatattccagaaatagtgccttgtagagttgcttctccactaaaacagaggtacataaaacttttaaatcctcccacaacaattactaaccctaaaagaaaaaataaaatttgtaatataccacttagtaaattttttataagtttattaggcatcataccaactcctttaaaatattttatatatagtataatacattatattatatcgtttttcaataaaaatattataattaacaatatatttttattgttaattatgcaaataaaaaagagtataataaaagcctttaaaatacatttttttcttattttaaaggctttttatattctacatttttattttctatattatatcctttgataatcgttacatctaaaatagaacttattaccctaaatataagtatctttataactagaatagtccattacaacagcatctccagattaatccactgatacctctttattatcaatatctaaaattgaaattttacaattcccacccaatttttcttgaactattttagctaattcatttaaagcattttcaaattctttaaatctactttcatctactaattcaatgcataaaaaggcattgttagtatcttcagtaagcattgttctcactgcttcacgccaattccaacatctacaaattgctccaccatcatctttataaattatttctccttcatatggaaatgaattttcatctgtccctagtgggataaactcctcattaccaattgctctagttagcctaatatctcctataaatttatctatatcctcccctccacaaggtaatgcatattttaatgagataaaattgtagatatccactaaagggttaatagttcctatattatttccattatgaactctttttaataatgcttcaatagaagaccttgctccttttttcgttttaaattttttaaatgcctctctccatactttaatcacttggttgttgctaaattctgagtcctccaagtattttaatgcttcttcttctcccttcaaaattattttcttatagtcttcatcttttatagagttatctatatcattacaaataataactccaatttttgcactaggaaatagattccaaaatgcatcctcaataacaaattttttcattagaaaacctcctcaaatttaaaatatgtaaaaataaaaaagcctatagaaatattattaaatatctcccaggcttttatccttccgtgtacacaacaattgcgcgttttctcttggacctgaccattataaaatgcggaaccctagaaaactaaattataagttttttaatttacaaaatacaattaaattttagcataatatagcatttaaaacaatattctattatctagtttgtacattaaaacaatttgccattagattataattatggtggcaaatgggtggcaaatcaccttttttattacatttttgtttgtttaaactattgaaaatactatattcttacaattttaatcaatttctgatttaaatggagtgtcatcagcttttgctattctatactccttatcagttatataaccaagctgatgcatcttatacagtacaatcacttgtctcttcttagcctctccatggtcaatataccttgcaggattatttgtcataccagctaacatagcacactcagctaaatttaattcactaacttttttaccaaagtagacttcagctccctttgcagctccatatgcatttttacctagatacatattatttaaatatgcctcaagaatttcatccttagtcataatcttattcatctgcttagcattatacatatcccttattttccgcttcatagttttatcattactagtaagcaggttttttgaaacttgcatatctatagtacttgcaccttgtgttgtatctgtaaacacattgtttaatactgacctaactagagaaataacatctactcctttatgcttataaaatctctcatcttctatggaaactattgcatgttttaaatcatttggcatttgttttatacttacaacctcactacttatatatttagacctaattaactttttagtaacttctggtgacccttttatagctgaaactgtaaatattgcacctgccactgaaaatataattagtgcaactaacataatagataataatgccctaactattctaatccttttttgtttttttctttttttactttttaattttttctctctttgtttatactcgactcttcttctttctctttgattgtaatctgtatttaaaggtcttacattatctcttgtaaaactatctctatctctttttataagattctgtgaatctactttttcactcattcttttactggaacttgtattaggacttttattttttttatttgccgaagtataagaatgtttagattttttattactatctttgttgttactaatttttttacgtcttattttattattatcattatcattgtaataacccattttagtctcccttcttcatataaggtacattatacattgttctacaaaataaatcaaagaacaaaattgtaagcttaagggtcaattttataaaggatattttcactaattttctctatatttataattaatattcatcttttattttcaaaaatagttttgcagttgctaatgtatcactgtcagctctatgagcatttatattctctatgttgtaataagcacaagctgtttcaagtttcttgttttttcctttataacttttacatttttttaataattctactgtacatatataattgtttattggttctaaatctaacatcctaagatagtaatttaaaaattttaaatcaaatttcgcattgtgtgcaattatagttctatcacctatgtattttctaaatctaggtaaaactaattctagtggttcttcattttctaccatttcattacttatatgtgtcaattctgttataaatgaagaaattatccccttaggttttatcaaccttgaatagttttttacaatttgttcattttttatttctgttattcctatttctattatttcacaacctttatatggatctaatcctgtagtttctaaatccacaactacatattctttcatatctcttctccttattattaaatggatatatttatattctatatttatgtaatagactaatcaatacttaattttatatgatataggaagattttacaaattacaacatagatatatcctatattccatcataaataaagatttttttattagaataattaaacttttaatttattgttatttaatctattttgataaacattatttattttattattatttaaatctttaaaatctaaacttttacattgttcatcattttcccatattcctgcttgtttatttccatcatttttatataatacacccttaccatttttcttattatctaaaaaatatcccttataaatgtcattattgggatatgttaattttcccaaaccattttttaatccgtatttaaattcacctgtatatattgaaccatctctataagtatattttcctattccatgcatcttgtcatctttccataatccttcatacttttccttacttgaaaaaatatatattccaaatccatttttctttccatcaacaaactcacctttatataaatcaccattatcgtatttaaatactttttcttcctttaatttcttattgttactcttatttttattattattgttatcctttatatgtatttcttctcttctggcttcaataaaatctctatcatacctaaatccgtttcttgatttaattttttgattaatcttcttcttattaataaatactctagctagttgagtaaatataaatacagatgataagcatataaatacacatagtattgttgtaaaataactagttatattttccataaaaaatcaccctttaaaaaatttatttaaaatacctaatataatatatatttttattaaatgttatttatacttttatagtactatattgaataaaattaactttgaaattatttacattaaaataaatcaaatacaaatgccataaattaagtgtttctagttagcataaaaatacttataaagtatgctcaaatatttcaaataaatacttttattcaaataaatctctacttatataagtgcttatataaataaaaagatgaactatagtaaatatagttcatcttttttataatagtatttatttaaaattaatatttatttagttagtagcatctacttagatatcagataagaaagcacagtcatttacttataataagttcttttcatatattttttattataattattcttttacaagaacttttataatttctgaaatgtacatagtatgatagtctttctctggataccattttttatcattttctttagcatcaaagttttctggtggcatattaccatgatatagctttttacatactataatcatattagcttcttcaaaagctaccgtatcatccacaaaatatggtgtaagtcctgctttttctattttatttatatctctaccagaaatagtaccacaaatatttaaagcctctctatacgtttcatcaaagaaggcaactgtaaatgtatcattactatctacaaattcttttgtatatctctgtggtcttatgtaagttgtaacaacatttttaccccaatagactccaacaccaccccagctagcagtcattgtgttaaacttttctgaatcaccagctgttataagtaaccattctttgccaatcttagtaaatggattaaactgtagttcctcaatttttacttctctaaaacccatgacttcatcctacccttcattttttaattatataaattaattgttaaaaatttgaatatatgtactcttataatactgacttttgattgtcctacataattcatgtaaattataatacaacaaatcaattactttcgcaataagtagttttcatattttataagtgtaaaatatagataaaatatattgattataaagtatataatatatttttaaacctaaagcaatatacaataaaaaaatgtagaaagtaagtatctctctacattttttattatatattatttttatattaatttaattttatcttgattcagttttataaaaaattgttataattgtcaagttctactctattatttgtaatttcttatatcttgttaacaacatttaagttattacatttatttatatatattttttcattatctaagtcttcatcaaacatttttattatattttttatctcatacttgtactcatcttcattcattctataaagcattaaatcttctaatacatctttcatgtcgaggtacacatcttctaataaataaaaatagccttcctctatatctttcaatttatctatagtatccatttttttatttatatctttcataatttctaaattttgtatatttacatctatgattgttaataagtacattctcacagtttttattatttcaacagaaaaatctacaatattataatttccttcttttttatataatgactccttaaatttgttaaaacaattatctaaattagaatttatatcgttaaatggtggtcttattatgtcacgtattattaaaagattttgtatatctacattatttgtgattgcctcatccaaaataaataaattatatgcatcatttaatgggtcatgggcatctccactaaactctaagttaacaaattcaagtaaatttttcaatgatatatagttcatacatctcataccacaatttatatatttttcttttatatctacaaataaatctctaatattatttacaaaccttggatggttattttttttagcacttctcatatctgtgttattgaaacatgtcaaatccaaattaccaaaagtatatattcctttaatatcagaaaatatgccaagccattttttaaattttctcatgacctcttcataacttggtgcactcttcaattcttcagaagatatatgtgttaattcttgtatatgaggatataactcctcattacttactggtcttattaaagatttaaatttatcaatattttttgttttttcatcatacataactgctccgattgcaattatatcagaattaaatactgctctttttgatttagaatttggcatattcatttcaaaatctatatatactcttttcaatataaacaccctttccaattgtttatagtgattctttttaactatttttattcaaaattttctaagaaagaatgtttctccccatctttttgccaaccaagtactgaatcaagatttacattttctgctgccttaaatatagatttttctacatttttaaaatttgattctaagctctttattaagtcttttatctcatatcttttattacctgtttttttagcagcaaccatacatgcacaatttaatggccatataccactattttgaataaatcttataatatgttcttctcttatataataaagtggtcttataatttttataccttcaaaattagtagaattaagtttaggaagcattgttttaaaatttccagcacacaataagttaagcattgttgtctctattacatcatcataatgatgacctaatgcaagtttgttacaccctaattcttctgcctttgaatataatgctcctctcctcattcttgcacacatatagcatggataatcttttgctatttcatctgctatctcaaatattcttgaatcaaataaatgtattggtatatttagatactcacaattatctataagtaattgtcttatatttgcatggtatccagggtccatagcaataaattcaacatcaaaattaacttgtccatgtttttttaactcttgaaacattttagccataagaatactgtcttttccaccagaaatcgctacagctatcttatccccttcttcaaccaatttataatctcttattgacttcataaacttagaccataaattttttctatatttctttattatacttttttctatatctcttactggaagtctttcctcaaaaggaactataatttcacagccttttcctgatagttcactcatctaatcacctcgtatatttatgtatatttatgttaataatattttacaaaaaagtctaccttcatccacaaaatactataatttttactttaattttactaaataatttatagtttacaataacacataaacttataataacataaataacctctttcttttattatcttttttatttttctcatttaatattttattattagtaacgatttttaaatgattgaatattatacactagatagagttacctatctatttacaacaaggaggttttcatcttggaaaataagactagagatatcaaaaaaaattgtggtccatctttggctagaccatacattaataatcaaattttcacagaaatgtactgcctttctgatgcattaaaatttggaactatatttccagaactaaacttactagagtctgaaatgtacaacaaagaattatatgctaagccaaaaaaatatagaggaggtagaagataatgaaagactcatctagagctgaacttatgagaaaagttcaggaaacatcttttgcatgtgttgatatgaacttatatttagacaatcaccctgatgataaaaatgctatcaacacttataattcattatgtaatcaatttgcgcaagctagatatgcttacgaaaataaatacggtcctttaactaactttgggtatgctccaagtagatgcccttggcaatgggctgaccaaccttggccttgggacagagaatttaattattagacatcaagtattggaggattgaaaattcatgtggatatatcagaaaactatacaacacccagttaatataaaaacttgtgaccctagaatggctaaatttcttataactcaatttggtgggccaaatggagaacttgctgcatctttaagatatttaagccaaagatatacaatgcctactggtaatatgcgtgcacttttaacagatattggtacagaagagctagctcacgttgagcttatatgtactatggtttatcaattaacttctgatgcaagcccagaagagttaaaagctgcaggtcttggttcaaactatgctcaaaatggatatggaatttatccaacagattcaaatggtgttccatttgatgtaagacctatagcagttatgtcaaatcccgtaaccgacttacatgaggatatggcagctgaacaaaaagcacttgcaacttattatcaacttataaacctaacagatgacgttgatgttatagatgtattaaaattcttaggtcaaagagaaataattcactatcaaagatttggtgaagctttaatggatgcttacgagttagaagaatctcaaaaaatgttctaaaatttttatttgtataactattattatttgataatttataatttactgttgtgttaaaatttataaaaaatataaatataatttattttctataaacagagaaaataaataaaaagcaggtatcaatcaaatagtaacatgtattatactatacattactatcaatattgtacctgctttcatattataagcaataaagaaaaatctatttattaggttttataataaaacaattataaaactcttcttgcatttacatatctacttgaatagtagctactatttatattagatattgttactttttttgatgaacctgaagatgcatgtatcatatctccatttcctatgtatattccaacatgacttacagaaccattatttgaaccttgtgtatcaaagaatactaaatctccacttctaaggtctcctctatttacatatgttccatacttactttggtctctagatactcttggtatactaactcctgcagattttttcataacgtactgtgtgaatccagaacagtcaaaactatttggaccttctgctccccatacatatggttttccaagtagtgtctttgcaaaacttattacactatcagctccttgacttggagaattagtcgaataagatggaattgaagtatcaacagaacctttttcagcaaggtattgacttgacacatatccagtttgattgccataacttacttttgtccatcctccactttcagaaatacttccaacctcagtaccataacttaatgtagctattttagaatgacttgtacctggtcctgttctaacgttcaatgactttgctgttacaacctttgtaccctttacaaggtcatttgaactgttttcaacattttcatttgtagagtcatttacactagttcctaaatatttacttgaaacataacctactctaccattagaacttatttttgaccatccatttgactcagatatgtatccgacttcagtcccatatcctagtgttgatattttagaactacttgtacttggtcctgttctaaaatttaatccttttgctgttacaacttttgtcgacttaactgaagtatcactactttcattgctacttccaaggctatttattgctacataatttccatgcacataacctgtgtttccattatatttaacttttacccaagaaccttcttttcctacgtactcaactttatcacctttgtaaagtttccccattgattcatggtttgtacctggtccttttctaaaatttaccgcattccctgttattgttctgctttctatactcacactctctacttcagactcattagcatatgctaaattccccatagtaggcattattatcgcagttgccattatactggctgctattctcttttgattaaaattcataactttccactcatctcctcttttctactatctttatttcacttcaaaatataaaagaaataattgacactattaaaatatcaattatttcttttatattaatattattacaaatttgtaactatttgtctatagtaatatttgcttaccataaattaccatgtataaattttaatcttcaatagcctgtaatttagtaatatagccatcttttaccttttttaaaaatggctatattttttaacttttttgtaactttttaaaatccagttgagccaaacccaccttttcctctttcggagtcacttaattcttttacttcttctatgttaatatcatagataggttttactatcatttgagcaattttcatatgcttttcaaccttaaaatcatttttcccatgatttattaatataattttaagctctcctctgtatccttcgtcaatagttcctggtgtatttaatacagtaacagaatgctttaaggcaagcccacttctaggtcttacctgcgcttctgtcatagtaggaagctctatacatatcccagttttgataagtttagtctctccaggaggtattacaacctcttctatagaatacaaatccataccagcatcacctttgtgagcaaaattaggtattatagcatcatcatttaatttttttacttttaaattgtacatcttatatctcctttcaactttctataaatattataacttaaatttcgacctcttgaagttttttatttttttgtggtaatataattattagtgttttaaaggaggattttttatgaaacttgtacttgctgagaaaccatctgtggcaaaaactatagcatcatttttaggtgcaaagaccagacaagatggttactttgaaggaaatgattatataattacttatgcagttggacacttagtatcattatatgatatgaaggattatgataaagataaatactctggctcttggaaaatgaacaatttcccatttgttcctgaggataagtttaaatttaagattgatagttctaaaactaaacaattcaacactgtaaaaaagcttttgaatagaaaagatgtagaatatgtaataaatgccactgacaatgaccgagaaggagaacttatagcatttttaatatttttactggcaaaaaataaaaaaccagtaaaaagaatcttggtaaatgaatggacaccagaagatattacaagaggtataaaaaacctaaaagatgaatatgaaatgagaaatcttcaagctgctggatatactaggcttattactgactggttgattggaataaatttcacttctgttgctacattgaaatatggaaatgggaaactattaaacataggtagggtaattcttccaacagttaaattagtctatgatagagatatggaaatactaaactttgttcctaaaacttattatgaaatagaaggacattttaaagctgaagctggtgaatataaaggtaaatatgttaagggtaaagaaagtaaatttgatacacttgaagatgcaaataaaattatagcttcaattacatctgaaactggtaaaatactagataaaaaagttactatgtcaaaggaatatgcaccaaaactttttagtttgacatcacttcaaggatatataacttctaagtattccaattttacatctgataaggttttaaatgtctgtcaatctctctatgagggtaatggtaagggtggatacataacttaccctagaactgattccattttcttagaagaaagtttggcttcaaaagcttctcaaactttagataaattaaaggttggtcttgaatatgaaaataaaattaaattttctaaaactaaaagagtttttgattcttctaaagtagactcccatagtgctataattccaacttatataattccaaaaagtttatctaaggatgaacaattagtttatgatgccataaaagatagatttgtagcaaactttatgcctcctgctgaatatgagaatacagaaattaagactgaagtagataattgtactttcttaacaaaaggtaaagtgcttaaatcaaaaggataccttgaggtatataataaggaagaaaaaaacgatttacttccacttgtaaataaagatgatgttgtagatgtgttagaaataaaaccattaactaagcaaactactccacctaaaccatatactgaggacacccttttaaaggctatgaaaaattgtggtaaaaatgtgcctgaagaagatacaacagtgctatctggatattcgattggaacatcagccacacgtgctgatgtgttaaagaagataagtcaagtgggctatgtaaagaaaaaagggaaatcttattctataacagaccttgggaaaaatttagttgaaatttttcctgttaaagacttatttgatgtagattatactggaaaacttgaaaaaagtttaagcgatattcaaaaaggaaagtatacaagaaaagaatatcttactaatatcattagttttatatatcaaaatgtcaatattataaaacaagatgcttcaaaaaatataaacacagaagcatatactttcgattcaaaaactaaaaaatttactaaaacaaaagaaaaaaaacagaaaaaagatgtaactaatactgaaaaagaagttgctatatcaaaagattctaataacaaaaaagaagttaaaaatggtgatgaaaatcaatctcttggcaaatgccccatttgtcaaggtgatgtactagaatttgacaaaggctttgcttgtaaaaatcataaagaatgtaaatttgttatttggaaaaatgataagtatttaagtctttataaaaagaaagttaacaaaacaatggtcaaaaatattttaaaaaaaggtgaaactaaagtaaaatctttaactgctaaaaacggtaataaatttgatgctacattaaaatatgataaaaatccagataccggctatttcaattggaaaatagagtttgacaactaaatattcataagaaaagaaatagcagtagtataataatctatattatattactgctatttcttttcttatgaagttttaacttttttaatagtgacttttacaatcacactctaacctaatttctttactatttctgataactttaatgtatgttcatctaataaagttagttcctcttcagaaagattagataatttttttactagagattctttgagaatagcttttactgcatcaaataatttaaatgctttatctgttaattcaaccctaagaatccttctatcttttgggtcaggaaatttattgactaaaccatgttccactaatctgtcaataatcggagtcatatttgattttaaaattcctaaattagaagctatttgagaaattgatgatgaatttgatgtcataagataaagaattaccttagcatgtgatggagccattggacattcttcaaaataagctttcattatatcagagttattttgaaacttttttaacaaatcgctttctttaaatatattattttcaagcacaaataaaaaatctaaaaaagagtccgctattttaagtatattgttgttatccatatttgtaacatcccttcaatagataatataataaaacattgttgtttaatatagtataaattataaactattaataaatttaaaacaagaaaaagttattgactcataataattataaatttataatcaaattagagaattataaattgccaataaagggaagttttttaattagtctaaaactaaacttaaattataagacactttaaattctacaacaagctagtgtgcaatatataataggaggagatatgaaaagatatttaatagttttcttaatgtgtagttcactgtttttagttggatgtggaaaaacaaaagaatctgaacctgagaaaccaatagcagtttctgttcaaaaagcagtaggtggagaaattgaaaacacaaattctttctcaggaactacaaaagttaaagatgaaacagctgttactgcacagactgttggcacagttcaagaagtgtatgtaaaacttgggcaaaatgtaagaaaaggagatgaattattgagtataagcagtccagagctagaaaatagtgtaaagcaaagtaaagcctcactagatttagcaaaagcaagttattcaagtgccactggtggttcattagaggcacaagtaaatcaggcaaaaacagctcttgacaatgcaaagattcaatatgaggagtctcaaagaaattatgacaataataagattctttatgaacaggaagtcattagtttagaccaatttaaaaaaatagagttttctttagagcaaacaaaacaacagttagattctgctcaaagagcatacgatacagcaacttcaaaaagtatacctcaagctaaagcacttgctaaaaaacagcttgaccaagctcaagtatcatataatttagcaatgagtaatttagacaaattaacattaacatctccagtagatggtacaataacagctaaaaactttgattcaaaggaaatgataacacaatcacaaccagcttttattatttctaatcctaatatactagaagttgatttaaatgtagcagaatcagatataggtaaatttaagaaagatggaaatgtagatgttataattgaagaccaaaggattttaggaaaaatagattatgtaccttcagtagttgaccctcagacatctttatatcctgttaaagtacttgtaaataatgcaaacaacaaatttaaggcaggtatgtctgcacaagtaaacttaagtattgaaaaagaaaatggtgctgttacagtgcctaaaaaagcaatatttgaagaaaatggtaaaaaatatgtatacatagcaacaaaagacaatatagcaaagaaacacttggttcaaactggaattgtaacagaggataaaatagaaattaaaagtggtgtaagtgataaagatacagtgattattggaggaataagtcttatttctgacggaactaagatatttcctgtagaaaaggagaagtagactatgaatttaacacagacttccgttaaacgtcctctcacaatcataatggtctttttagtattaatagtttttggtggtattggatataaaaaaatgtcaataaatctaatgcctgatatagaaataccagttgtaatggtcatgactacttggacaggtgctggtcctcaagacgttgatgaacaagttagtcaaaaagttgatgaaagtttatctgccgtttcaaatgtaaaatctactatatcaagttcacaagaaagtgtttctatggtagttgctcagtttgaatttggaactaatttggatgaaataatgaatgatgttaggtctaaagttgatgcattacagaccagcctcccagatgatgcagcaaaaccaacagttttaaagctggatatgaatgcacaggctataggtcaacttgtcatatctggaggaaatgaaaatagttcacaagccttaagaaaatacgctgaagatgtaattcagcctaaaatagaatccatagatggtgttacttcagcagaccttaaaggtggagaaaaagcacaggttaatgtaatagctgacccagctgttctttcaaattatggagttagtttatccactataaaaggtgtcttatcctctagtaataaaacattcccttatggttcaattactcaaggtgaggataaaatagttttaagagcaattgataaattagaatccctagatgatataaaacagattcaaattcctgtaaaaggaggaaatacagttagattagataatctttgtagtgtagattatggatatgcagacaaagatagtatttatagatacaatggaaaagacagtttggtaatagatatttctaaacaacaagatgccaacactgtaaaagttatgcagagtgcatacaaatacgtagatgaattgaataaggaaaatcctcaatttaaaattaaaattgctaatgatacaagttcatacataagtgaatcaataaacagtgtaatgagcaacttgcttataagtgctgttatcgcatttattgtaatatttgctttcctaaaaagtgtaagagcttcactagttgttgcagttgcaataccaatttctataataggtgctatagcaattctctactttactggtgaaagtttaaatcttattactgcaagttcattggtaatttcagttggtatggttgttgataatgctacagttgtaattgaaaatatatttaaatataggaaaagtggcagattgagtcttgatgattgtgctattgagggaacaagaactgtaacaaatgcaatacttgcatcaacattgaccacgatagcaatattcttacctatcatgtttacagaaggtatagctaaaataacttttggggcattaggtaaaacactaatagcttcactagcattctcctttataggtgcaattacactcgttcctagtgtatttgcaaaattaagcagaggaaaaaatagtcaaaagatgcaagaaaaagatagtcctatatttgataaggtaagtgaagcatataaaaaattattaagtgtatgtttaagacatcaacgcttagttgtaatatcaagtttacttatttttgtagcttccttatttggaatgggatttataggtatggactttatgcctgcagcagacaagggtgaattatctatttctatagaacttccaaaaggtcttagcctagaatccaatgattactatgtatctatgactgagaaaaaagtctcagatattccagaaattaaaactttaataacaactttgacatcagattcaaataatagtaaagcaagtatagcaattgaattagaatctcaaaaaaatagaaaaagaactactgatgaaatagaaaaagagataattgatagagtggctactgtaccagattgtaaaataaatgtaagtcaaaacagtagtgttatgggtggagctggaggagcagacttcacattagaaatgaaaggtcctgatttagatgtattaaaaatactgggaaaagaagctgaaaaagaatttagctctataaaaggatttagaaatgttgaaacttctcttacagatacaacacaagaagctcaatttactatagataaacataaggctcaagaatatggtgtaaatactgctgaaattgcaggcatgttacgtacagcaataaatggtgactccgtaaccactgctactattgatgattacaaagtggatgtaaacctaaaatttaaagcagatactattgatagcttagaagatataaagcaactaaaagtaaactctgcaactggaaaagaagttcctcttggtgctttttcagatataaaaatggcagatggtctacaatctatatctaggactgatggagatttttctgtaaatataactgctacacttgacaatttagatgctggtactgctacaaaactagcactagaaaaaacgaataaaatggtaattcctaaagattactctataggtgttggtggtgaaacagaaatgatgaatgaatctatggcaagtcttggattttcaatggtcatagctatagcattagtttatatggtaatggtagctcagtttgaatcatttagtaaaccatttataatcatgttctgtgttccatttgcattcgttggagttgtgctttcgcttctagttagtggtcaaagtttaagtactgtcggtatgctaggtataatcttacttatcggtattgttgttaataatggtatagttcttattgactacatagagcaacttagaaaaacaaatcgtaacaatgatttaattggtttggtttcaattggttgtgcagcaagattaagaccagtcttaatgactacagcaacaacaattttaggtatgttgccaacagcactatctcttggtgaaggtggagaaactatgcaaccactagccatagttataatgggtggtctaactgtatctacacttataactttggtgcttatacctactatatacttaatatttgataaatgggaaaataagttttcagacaaaatgcctaaaatatttggtaagataacagataaaataggaagtataaaacgtaaaataataaagaaaccaaaattgaaagctaaagtttaaatagaatggagggtgattgtattgaataaaaaaatgagcaaaatagttgcaattggctgtggtgttggtataataactgccaatttaatcccagtttacgcagataataatacttcttctataaacaacgttgataattctattttaagtgactcaaataaaagaacatctgaaaaggaaattttgactgctagagaagctgttagtgctgcacttaaaaatagtgaaaaattaaaaatgaaatcagaagaaataaaaatgttaaaagaaaagttagaagtacaagatgagtttgatagttttactggaagtgacaactcgtttccatacgaccaaattggacttcttaaaaatcaaagtgaacaggctaaaggctttatggaggaccaaatagcaaatgatattactaataaatttaacgatttagtttcaagagaaaatgagctagataagataaaaaacaatcttgaaataaaaactaaagaaattaaagatatgaaattaaaaaaagatttagggttagtaacatctttagaaactgaatcagctgaacttgaacttcaaacactacaaaatactcaaaaagctaaacttcaagaactaaaaaacaatcaagactattttaagttattgactaatatagatttaaataattatcaattggataaagaatatagatttgaatcttttagagtaggtggctcagttgattcatatatggaaggtaaggttaatgaatatttaaaatacgaccaattgattttagaacgtacagaagaaagctttaatgataaagatgagaacaaagcagatttaccagatagacctaatcttacaagaccagttgctcctacaaaaccagagcaaggtaacctaactgatgatgaatacaaggttcttatggataagtatgaaaaagactacaagagatatgaaaaagaagttgaagcatacaatcttgaaagacagacttatgctgctggccttactacttatgcaaattatcttcaacaaaaatttaataccgaaaatggtctagtaacattagaagacagtaaaaaagctcttaaaaaagggttaattgatagctatgctcaattacttgctttagaagatacaattcagattactaaaaaacaacttgatttatcagaaaaacaattaaaaaatactaaattaagatatgatttaggattaattactctaactgattataaaaaacaagtggtaagtaatcaagatgctaaaaatagctatgacactcttattgtgaattataactcactaaaaaatggtatagaaaaaccttggatacttaatactggaaaataattctggtaaatagaaagattactttaacatacgtttgattaaaaaatagttatgcacactcgtggctttagtcatggaagattcagaaggcaaataatagaaatagattagtaaaaatatatttacttataaaactgtatacttttatagaggctatctcaaaattggatatgtccctgtcaagtagacagacttaaaaaaggctatctttatgcggaatgagttcgatattcaatcgaactcattccgttttttaattgtattctttcattattataaaaataaatataatcatttattagactaatcatttcctttggatctgtagtatcaattaaatatattaattcagatttaaaatgactgaaaaaactttctataggagcattatcccagcagttgccccttcgggacatagattgtataataccattatctttaagccttttagagtaagatctacttgtatattgtgaaccttgatctgtatgtaaaatacaatctttagctaaattcatatttattagttgatttactgttttattaactaatttagtatccatttttgtacttatctcatatgccactatttcaccattaaataaatctttggctacattcatgtataagaattttttaccaataggtatgtatgttatatccatacaaattttttctaatggttgattagctctaaattcacgatttaatatattatcatatacctcatatgatttaaacttacgtctatatactttctttctaataatagatttaattcctagttctttcatcaacctatatactttcttatgattaatagggctatcaagtattttatttaaataagtacaaattctttttctaccgtaagttcctctatattttttatgtatttcaattatataatccttaataattctatctttgatacccctatcggaagattttttagaataacttagccatttatagtaaccgcttcttgacacacctatcaacttacacatactagaaatactatacttcctagacataagtttaattgttttaaatttatcgcttactttgacttgtccaatagggtacttaacttttttaaaaattcattctccatgcgtaagtacttcaattcttcttcaacagatttaaattttctattatcattttctagactaatatttttaaatctgcctctagtttcctcattaaatgcagttttacctttatttttataatcttttacccagttttgaacttgtgttttgcttcttatattcagcatctcagcaattttgtatgatgagtatccttcttttatatataaatttacagcttttagtttaagttctttgctatattttttatgttttttagacatagaaaaacccccttagagtatacgctttttagacttattataatagccttttatttaaatgtctactataaggggattatactaaaatagagataagcctcttttttattgtttaaattataaaaatatatttgattccatacaaaaagagtgccttctgaactaaaaagttcattttgagacaccctcaaaagcttaactctaaatttaattattttttatcaaatgtctcatctattttacatcttaccatgttaacaaattcagaaatattatatcctctaagtttgcatccacatttaggacaataatccagtttcctagataccaaagccctacaactaggttctggacatcttatttttagactctcatctgctactttaaatccacatcgtgggcatatactacctggacgtgatgatacttcctttccacatttaggacactttgtcaactttatcccctccagtaaactcaatttaattgatagttgaaatttctctctacaataatatatgcaatataattaaatacgtttcacttacaactgtataagttaaatttttataataaaaatcccctatattcaatttacaaatacttaatttgatacattgaacaataggggattttatttttatttagttacatattttgcagtctattattatctaggattttttatagatgcttgagctgctgcaagtctagcaattggcactctaaatggtgaacaagatacatagttaagtcctacactataacagaactctactgaagatggttctcctccatgctctccacatattcctagttttaattctggtttaacttctctacctaatttagctcccatcttaactaacttaccaacaccattttggtctagtacttggaatgggtctttttctaatatttcttcatctacatattgacctaagaatttaccagcatcatctcttgaatatccaaatgccatttgagttaagtcattagtaccaaaactgaagaagtctgcttcttgtgctatttcatcagcagttaaacaagctctaggtatttctatcatagtacctacagtataaggaacttctataccttcttcttttattatagcgtcaacagtttctactatcatttttcttattatttttaactcatttacttctccaactaatggaaccattatctctggagaaactttaacacctgctttgattgcttctatagcaccttgtattatagctttagattgcattacacatatttcaggataagttattgcaagtctacaacctctgtgtccaagcattgggttaaactcatctaaatcaactattctcttcttaatatcacttacttttattcccatagattttgaaagttcttctatagtctcatcatcatgaggcaaaaattcatgtagtggtgggtctagtaatcttatattaactggttttccatccataactttaaataactctacaaaatcttctctttgcattggtaatattttttcaagagctttttctctttgttctactgtattagataatatcatttctctaactgctggcaatctagcttcatcaaagaacatatgctcagttctacatagacctataccttctgcaccaaactctatagctgcacgagcatctctaggattatctgcattagttctaaccatcatacatttgtgtttgtctacccagttcattaatttttcaaagtttccagttaaagatacttctgttttcttaacatctcctaggtacacatttcctgtagaaccatctatagaaatgtattcaccttcttttataactacatcatcaagtgctcttatttctttattaaactcatcaacttttatttctccacatccagcaacacaacatttacccatacctctagcaacaactgctgcatgtgatgtcattccacctctagctgtaaggattccttctgctttaaccattccttctatatcttctggagatgtctctaatctaactaaaactactttttctcctttttcatttgcttttactacatcatcagcattgaaataaactttaccacttgctgcacctggtgatgctggtaaaccttttgctataaccttggcttcttttaatgccttatcttcaaattttggatgtaataattggtctaattgattaggctcaattctcatgatagcttctttttcatcaattattccagcttcaactaaatcaaccgctacatttattgctgctgctgctgttctcttaccatttctagtttgtagtatatataatctttcattttctatagtaaactctatatcttgcatatctttataatgaccttcaagtatatgagtaatttttacaaattcatcgaatacagctggcattacatctgcaagagttgatatattttgaggagttcttatacctgcaacaacgtcttcaccttgtgcattcattaaaaattcaccaaataatttattttctcctgtagctggatttctagtaaatgcaacacctgtaccactagtttctcccatattaccaaataccattgattgaatatttactgctgttcctaagttatgagctatatcattcaatttacggtatacgattgcacgaggattattccatgatctaaatacagcctctattgcaagcattaattgctcttttgggtcttgtgggaaatcattttttatttcttttttataaattgctttaaattcttttactatttcttttaaatcatcagttgtaagttctgtatcaactgtgtatccctttgcttcttttactctgtctaatacattttcaaatttatattttggaacttccatagcaacatcagaaaacatttgtatgaatcttctgtaactatcatatgcaaatctttcattttgtgtagcctctgctaagccaacaacactattgtcattaagacctaggttaagaattgtatccatcattcctggcatagagaatactgcaccagaacgaactgatactaataatggattcttattgcatcctaatgttttatttaagtctttttctaaagtagctaaatgctcttctatttcttttattatctctgctcttatactttcattgttaacataataatcattacatgcttctgttgttatagtgaatccaggagggacaggtaagcctatcttagtcatttctgctaaattggcacctttacctcctagtaaagatttcatgtctttgcttccttcaccaaaactataaacatacttagtttccattgttaaatcccccattaatctttttattttaatttatatcatttttattaatagacattattaaatttctatttctttgtatatctttagaccattttctttcattatgtctaaaattatacctgctgtttcttctattgccttatttgaaacgtttattactgggcatccaattcttttcattatctcttctgaataatctaactcctgaagtattctttctaaattagcgtagtttgctttactggacaatcctaaagcttttaatctttgggttcttatctcattcagcttttcaggtgaattagtaagacctattatctttttagtatctatctcaaacacttctttaggaattggtatttctggaactaatggaacattagctacttttatatttttattagctaaatacatactcaaaggagttttagatgttcttgatattcccactaaaattatgtctgcttgaagaacacctctagggtcttttccatcatcatatttcactgcaaattctatagcttcaactctcttaaagtaagattcatctaattttctaattataccagcttctcttttaggttttcttcctgttctcttgcttatttctcttagtatatctgtcattaaatctatacaactaagaccttctctttcgcaatatctttcaacaatactgcataattcttcatcaactaatgtatatacaattaaagcgttttcagcttttgcattctccaaagtttcaagtagtactcctttattaatcatgtatggaaatctttttatttcataagtttcattcacataaaactgagacatacatgcctttgcaacttgttgtgcagtctcccctactgaatctgatactgcatatataattaggtttttcaccagcatacctccttaattgtcaactatttctaagaatagcttagttatgttggtttttgatattctcccaacaactctcatatgatttttgtcttctcccttatattcaacaatcggaatcgaatctacttcatgttctattatttttcttgaagctaataaaacacttgctcctttagttaaagtgactacatttggagttcttgtcattatcatacctattggcattttatttatatcagaacctcctatagttgcttttagcaagtcttttctggaaacaactccacataactcttcattctcatctataataactatactccctacatcagataaaaacatagtgactattacatcatatatactttcatccttcttagctagtacaggcatgctcattatatcctctactgttttttcttttacacttttaccaattaaatttatttcactaactcctgaataaaaatatccaacttttggtcttgcgtctaatattcctgtcattgttaatatagctaaatcagatctaagtgtagcacgagtcacattcaagctggaggcaatactttcactcgttattggttcattttccttaactatatctataatttttagttgtctttcattaagctgaataataatcaccttctttcattgtgctatactttttatcttttcgcatcttatatagtatattatataactatatataccattctgtaaacagattttttattgaatacgatatattttttactaagttctctcgcttaaagatatttattatatattaatgggggatatttctttaattaatagaactatattagtattacagttaatattataatacataattggtcattttaattcattttatattaaaatttttaataatattgtttcaatgtgaatataaaattgcagaactaattcaaaataatttttacgactacaaataacctataatatacttttaaagaaagtatcctaacaagaatatataaaaatttaaaagggttgatttaaaaataaccatcaaccctttttactaatatctatttatattaccatcaaatcttacccaaatattttttcttgcaattgtcttaaatgatataaagtagtatctttttctatctctaccatatcgtaagttataacttcaccttttttaatatcttttacaactttagtctttttacttatcaaaccaataggtacagcattcatagcctttgctacatcgtatttttctatagtaccatagcatgtatatgctccataaccatccataaactcaccttttttcaaatctttcttagctatagtcataacttctgctactagtccagctttaggtactattgtagccttatggtctaagactgccatagctgctgataaaggagtctctaaactacataaatgatatggtctatataatatgtaattaggtccatcacccatacttaaatattttagttcatcattaactgcttttaatttatgggctactactacgaaaactccaggtgctataccatttacaaaatcaactacaccataattatctaatactccaccttcgctttttaatgcatatttcttaggtacttcattaactgtagcttcaataccatgaccacctcttacatcaggcacaaatccagttgcattacacattaaagccatttctaccattgttttagttccttctttaaaagaagctatcatatgaggtgaagctccttttctttctgcttcttctctaactgtatcaggattacaatctaaatctaatttattatttttacctttacctatcactctaacttcaaaccccattgcatctgcaaaatcaaataattccattactgcacctggctcatctcctgcagaacctgtaaatatcactccagcatcatctgctaattttttaagtattggtccaacaacacaatcagtttcagcatttaacataactatatgttttttatttaaaatagagtttaatgctatctctgcaccaattgcaatacccccagttgcatctataactacatctattgacttagttttacaagccacaagaaagtcattacatgtcaatacttttccttcttgtaattttatttctgcatccttttcatttgttacattatctataatttcttcatctattcctgcatcagtaaaagctttatgagccaactccaaatttatatctacaacaatagaagcttcaatacctttcatatttgccatttggcttaccattccatttcccatatgcccagctcctataagagctacttttatttttttaccttcctcttccaattttgcaagttttctgtttaaatctaacataccaattcctcctgttataataattttattttcaaattaagaaatagttattaaatctccaatagttatatctggatttcctatttccacatgtatttctcctggtaaatttacttcacattttccatcaaatttgattgtacaatgcccaatttctctaagagtcttctgagcaatatcaccaactgaaactatacaataatctctattccctatagtaagtgtatctcctatttcaacatcactttttaatgttgctatcgaatgaattacagatatatcctttaagtcgtcatcattaatggtttcatcatatataataagacaattgctttcatccattaactctttaactaaactgcctatcccacttatcttaacttcatatttcatgacattcctcctgataatttatatttatattgagttaattaaaagaaacatttattttttcttttataaattttatagcttgtacaatactctcttcatctttaaatttttgctctgcactatatatatctaatccttctatttcttcaatctctttaaatttagccattactgtacgcccttttaaaatttctccaaactttataaacccatctgaatctgaagatataatggctatacttcctttagaaaaatagcttttctttttgcctgtagacactatatcacccttttttttagctctatttaaagttttaaaatacaatttattctgcttcattataaatatagtatttaaaatataagcaacaaataaaattactaataatttcatatttatacaccttccaaaaatcacattatttttaaatctgtataacaactataaatgctgtacaatagttatataaggtttttaagtaacacctttttaaattctaaaaaagttctacatttacttatcttattcgttaattttacatcttggcctatctttaaaacttcttcataaatttttactaataagtctgagtctatcttattctcacatggaaacattgtcataagaattatttttatacttctatttgcatattctattggttcttctaaaattccaactgccattaaaaacttatctgatttttcatttacagagtgaggaaataataaacctttatcaaatactgtgggagatttttcttctctattgactatattttttctaaacttatcatcaatacatcccaaatccataagatggtccatcattttttctaatgaagcaagtatagtcttttcatttaatatcataaatttatcttcatctaacaaattatttattagtaaatttgtagaattagtagtgtcaatattcccttctcttaggcacaatactgtttttaattgttctcttaatttgttttcatcaaatattgtatttatttttaatactattgtatttatattcgatgtgtctaaatcaatagttgtaaaaactatatcgtattcatctaagttaatatttctcaaattaaaacttgaaagagtatcaattttaggattatttcctatcagtttttctactcttattttcaatagttttgctgttcctagacctgtactacatataattgctattttttttattgaatagaatctactgctatttctttctaaatatccactgaaatggattgctatatatccaatctcatcttctgaaacttctaagttatactttttctctattacttttcctgctatttgtgctaatttaaatggaagtatataattttgcttaatctcttctaacaaaacattttttaactttatattaaataatagcctgtttaaagtaaaactaagatgatatcctagacctactcttaattcatcctcatttataaaaatacccatatcgacatatatttgattaaatatattttccatcaactcatcaatgtttttactaattctactactatttaaagcacattctgatgctggtgcatttccactaactaatggtatagttaaataaataatttcttcatcatttaaagtacattcaaacattcctgatattatatgttttatttccctagcaataaagtattcatcatatgatttaagtaaatcaaactttacatcatagtcttttactttcttttcttcttttactctatagactaaaactactatgtagttaataacttctcttaacatttcatctgtaacataaaaattattttctttaaataaagtcaatagtttttcttctaaatttatgatttcttcttttttgattcctttaaaatactttgaattactgaaatctttccttgagtttttatacaactgatttaatataaacagtctaatatcaagttcatttccatttaatttcatacctgtattctgttttttaatcaagtttaaattatatgaagccaaaactttttctacatactggaaatcatttactaaagtagttcttcctacacacatctcatcagctaaactatcaagtgtaataaatccatctagttctatcaagtaatttagtataaactctactctatcttcttttgaatttaatgaaaatacattttttctattcatatcaataatcttattgagtatctgctcatcttttatttctagtttatagccttgaccctttatatatttgattactgctatatcattacctaaatctttattcaattgttttatatacgtccttacacttctagttgtgacattcaattcatttgctattgaattaatactcacaaactcttttttactacacataatcaatatcttaaatatcttgcggtcaatagaaggaattttctcagttacactcattttgtatctcctccttgatttcattctagtacaaatttgaaaccaaattaatacataaaatttcactttaataaaggaaaatttagtattaatctaactcgataattacagctaattaatagtataaaagctagtctttcattaacaaaaaatcttgactagcttaaatttatatttacaattttattaattaattccaagccttatattgacattaaatattatctcaatgcaaatactgcaactccatatgcaataataacagctattggaccagttattaaacgagagtaaaataaagctggaacaccatactctacagtttctggttctgcttctcccaaacttaatcctactggtacaaaatcacatccagcttgcccatttattgcaaataaagctggaagtgctaaatatgctggtattgcaccaagaccaatttgtgtacctacaagagtccctactacttgagctataactgcaccaggtcctagtattggtgataagaatggaagtgtgcaaattactgatataatcaataatccaccaatattacctgcaagtggagatataactcttgcaatccagtctcccagtccagatgctaaaataattcccataagcatacttacaaatgccataaatggtattacgttattcattaccatttggatagtgtctcgacctgcatcataaaattttgatactacttgccctgccccttgaccaatagaaagtattatgttctttttagcatattcaccttgtgcttttgacttaacctcatcataattatcaggctttctaatagaactcttattttcgcttttattttcttgagatttttgtggcatatcttccccatctacaacacttatacagttaggattaacatctgatacataatattcttctgttataaattttgctaaaggacctgtttttccaactggatttacatttattgtaggtatttttttctttggataaactccacatctagcagttccaccacaatcaataataactactgctacttcttcatcagaaactccagttttaaatccatctacaatttcacaacccagtagttcttttatttttaatgttacttcatggataccaccagcagtcattgatagtatcttatttctattcccttctttttttatatacaaaggacctccccagcctgaagttcccttttctatttttaatattttattctcctccattttatctacctcctaagccttatttgttgctctattttttcttgttagaaaagcatacattttttctgttactatacctcttataaaaattacaattagaccaactataaaataccacaatgccagtgtagtagtttctttacctaaagtagtcaaacctgctgatattcccaaccatacaaaaagttctcctgcatttgcatgtggaaaaagacctgtaattggatgtacaaatgaaactgctgcatcataaaatcctgctttgtgctcttcttttaaaaatctaccaaatgtatagcacataggatttcccaagaaaaatactgatactaatggaagtagaatatatcttgtaaaagagttctttcctagcttagaagcccaattattaactctttcctcaccaattatcttaatcaaagagttaatagctaccattaatacaattagcgttggaagagtacctgaaacaagacctataaattgttctccccctttctgaaacaaaccgataaaccactctgcacctttacttagacctgtaataacgttttccataaaattataacctccctataatatctttaaatttttaattttactgcttaacataaattttacaaattacatcttttttctgtactatatgctaatattgtaaatgtttttttattaatatcattttaatataatatttttgataaataaatacatcttttttcaattttataaaggaaaaaattgtactaattagaattttcagaaatatacaattcttatttcgactatattctaaattcttcttagaaatttaagaacttatttttatttcttttattattaaaattatctaaatctgataaaaataaaaaatagatgctcttttacgaacatctatttcttaatcaaattatcttttagttttcttatagattattttataggtatataaatatcaatttgtgagttcacattactaggacctaaaaatcgttcatcatatacttcaaaatcatctcttatatccagttcttcttttgaacttaaaaaccaagtaccccatatatattcataagttttgtctaagttatctaagctaccagtatgagtaaatatagcatactttccttccttaatagtttttgaaacaaatgaatttggaatcacatcataactattaacttcaagtcctattatctcattaaattccatactttcactaactaggtgtatttcagagattgcttcacagattccaaaaactctctttgatggcaaagtatttgggacaatatgatgtacttttctgaatttctcccacaagtcaggtaatgaattattttctaaaattactttatcctttatacctattacctttattttttctatttcttttataactggtttaatcgttatatttccaacaagatgtctcataaaatctaactctaattttttctttttaccaacaaatacatcaattctattttttctatattctatagggctaaccttgtatatagatttaaatgctctgctaaatgcttccgaagattcaaatccactaccaatagctatatctatcacttttttatcactatataaaagttcttttgtactacttactaatcgtcttttttttatataacttcctacactctcaccaaacatagacttaaataagcgtgttaaatgataataagaatatccagtttcttttgccacatcatttacagttatattttcatgtaaattattctcaatatacattacagctttttcaaaatactttaagtaatccaatatggcacctctcttctacttaaactctttaaatatgtaaaatagcactattttttactatactaaaatattataactaattcaatacgataaataaaaacttttagttgatttatatagcctaattatttagaataattaaatacattttttattcaatgaaatcaaaaaagtcagatggtgctttttcaatatttatgtttatcctctgtgttatagatttaatgtcattttttaaatagtagctctcccatttattctctagtccaccccataaaatattaaactttcctatatttaaatccataactatactttttaaagttccaaaaaaatcattatagtaattacaagataagccatttggatactttaaagacaataaattcattaactctttctctccaatttttttagccttatttatatattctttaattaatttatatctatgaatagaatttttcattgattgtggttctaatttatgaagtttatcaatatgtgtatgattagtagagtgtaaaaaatattctctcttactttctaaactgttgattatatttacttcttttttcccatctaaagtctccacaagtgcaatgtttccagacttatctgcaagcaataaattaatattgtatgcaattggcatatcttttaaatattctaatgcttcatctacatctttgcaattttctaacaaatatctaataacagcccaaaactgtaaacctacaattgctggttttctcaaaccatctgaattgcctacaggaataccacatgatgactgacttacacctaatccacattcattcataccttcacctcttccaaattgcataacggtagtacctatatgtgcatattttccatttactttagttttacataaaacaaaatcctccatattgtgtgagaaatcgaaattacgtgcaaatagtacatgcccattttcagttaattctggtgttaatgcaacttgactacaacctggtttaagataagtcatagtataatataaaatttgattacaattcacttgaattgcatcagcaaaaccttgcaattcttcattaagacctggacaatatttatcaaacaactctatcatctctttttcttcttttttgcttaccagattagatttattaatctgaccttctattatctctggcatattagcaaccaattctcctagtctgtatcctatctcataatttgtaccactcaattcaatatttcttacttctaaagtttccatatgtacccctcctatatatcttataatcgattttatcattcgaattgtaatcattcatgatattttgtgctacaagttaaaaaaggttatataaaaacagataagcctctttttcattgttaaaataataaaaatatatttaatttcatgcaaaaaagagtgtctcataaactaaaaagttcattttgagacactcttcttattttaaagagtataattaaaaatagtctaagttctactcttccttcatttttttcaataactctggattttcaaataaattaaatcctgttaaagctaatatttttataccatcaattactctatcttttgcatatgaatttatagaagcctccaaaaattcttttgtatgtagttcttctccattttcagaaaacttcatcaaaggatgtatacatggcattatttgacttaaatttcccatatctgttgaacctaacattacttgttcatcttcatatattccaaattcctccataatctttgtaaatatgtctaccaaaactttattttcatttaatccttggcaagttggttcaaagtgataaaattcaagttcacatccagtggctattgcagcacctctagcacaatttttcactttttctactacttcatcaaagtaattttgttcttttgcccttatctctaatcttacttttcccatatcaggtattacatttgcagcagttcctgcttctagtataataccatgtattctcgttccatctactaattgttgtcttagtgcatttatattattatatagtagtactactgcatctaaagcatttattccgttatatggcttagctcctgcatgagatgcttttccagtaaatatgaaatctagacctcctattgctataatttcaggtgttacacaagtttttgaatttggatgtatcatcattgctgcatcatagccatcaaatacaccatgttctatcaagtaaggctttccatctccagtttcttcagcaggtgttccaattatacttacttctcccttgtaagtatccagtatacttgaaagagctattccagctccaactcccatagatgcaattaaatgatgtccacatgcatgtccattgcctggaagagcatcatattctgctataaatgctattttaggaccatctccatttttcttggttgctttaaaagctgtagccatacctgccaagttttcctcaacatcaaaaccctcttctcttagaaattctgatatttttttagcagatttatattcttgcaaagcaatttctggttcatcatataaagattgacatagccctagaattttttctttctttgaatcagccacttgtattattctttctttcataccaatcttacctcccactaaatttatttagtaatttttatattttattataactttaatttaactcatgcttatcctcttttaagtatctattttcccaaaactcagcatttcttatatctaattctataggattaaaagttctatcgctcctttttactcccatctttttctgcctttgataatcgtaatatgcttttatagctggtttttttagtgtaaatataccaactaagtttatatatgttaatacacctatacatatatcaccaagtgcccaacttgtaagtggttctataaagcaacacattgctgcacatattataagcataaatctacagacattaattatgtgcttttcatgtttttctgccttaattctagtcactaagtaagatacgttggtctccatcatgtatgagaaggctaataatgttgtaaatgtaaatagtagtaaaactattgctataaaaatatcacctaattgaggatgtaatgtatttattgcactctgtacatattgtggacctggttctacacctggtaatgttgtgtaaacatctgtaacattatacattcctgttattataatcataatacctgtagccatacatattaatagtgtgtctacataaacagaaaaagcttggactaatccttgtttggctgggtgactcacttctgctgctgctgcaccataagttccagaaccttctcccgcttcatttgagtatatacctctttttactccccaagatattgctgaacctaacatccctccaaaaaccgaaccaaatccaaatgcagatttaaacattgtcataatagctcctggaactagatttatatttgctatgattattaccaatgtcataataaggtatgctccacccattataggtactactttctcagcaaataaaccaattcttttaattcctccaaaaattattatacctagtgcaatagaagatgtaactgctattgtcatttttgaaaatccaaatgcttgattcattgctagatatagagtatttgattgtgtgccaggcataaaaaatgtataacttatgattgcaaccactgaaaataaaattgaacattttttccaaccaagacctttttcaaagtaatatggaggacctcccctgtactgtccatcatgctcatctttatatatctgagctaaagtagattctacaaatgcagttgccgaccctaatgtagccattatgcacatccacactaatgctcctggccctcccattgctatcgctacagctacaccagctatatttccagttcctatccttcctgccatagatgtagcaaaaccttggaacgaagatattccaacatgagagctatctccttcaagcaaaagagtaaacatttcttttacatcttttatttgaaaaaatcttaatttcattgaaaaatataatcctatacacaaacacattgcaactaatacaggtgaccaaacaattccattaatggtgttaactaaatcggtcacttaactcaccaccattcattttatatttatagacaataatttaaatagctatgtttcaacattctatataatcttcaactcaatatatctaaaaaatctatcttctatttatattatttttaatccacaagctataagtatctatctctaaaacaaagaatattaatcgatatataaacgtaaatttataaactttttaacgatatgtatttgacaaataatcaaacaatataaattggaatacatgtaatgaaaagcctgaaactgttactatataaatagtaccatatacaattattaatatataattgaatagtatatagttagattttaaattttcgtatttattatgaggtgtaaaattgagtacaattaccacctatttttgaaattcttttaatttaaattaaataggtttatgtaaatatataaatagatgataattgctactcaattccagacctttaggggtaactttatactaaaacctagaaaacttgataacattttggtgtgttgcactttaaattttaagtattgctataaaacttaataatttggtatttttacaatatttatgcttctaacttactttctcttttcttcttaacttttaatatatataaacaagatagtataccaattattagaattgctatctggaatataaatgtatatgtgtaacctttattgccataagtatctatccagtgtcctattaatgcaaattggaatacatctggtgaaaatcctaaagctgcagctatacctatagtagttgctgaatatttaactggaacttttacttcatcttgaactgcatagtatataccttttcccatgtaacctaatatacctactacaaatgttaaagctataaagatagtcattggagtagatgcaggtagtactaggaataaaattattactgctataccaaatacatatattggtagtagtacttttgtaggtgattttactttatctgcacaatatcctccaaatggtgctccaaacaattttagaccatgttgtcttattattgctaatgccccagacaatgccacagaacctccaagtactgatgttatatatggtgtaaaataagacattgtaactgtgaatgaatatacacagaatatgcttattcctactagccaagtgtttggtgattttagtactgtcataaaatcgccagcagacattttttcacttgcttcttcttctttgtcttctctgatatctacatctttaattacaaaccataatactggacacatcactattgataatattcctaaagatatcattacccatctcatacccaatacaggagttgaaaagcatgtataaatatataagaatattgctcccattactacgccagaaactccaaccatagcttcattgaatccataaactttaccttgattatcttttcctataactctaagtatttttaccatagaaggatagttcataactaatgatgtgattgcacaacctacccaagtagcaactgcaaatggatagttcatattaaatgcaaataaaaatgatactactccattaagaaatacagaacctaaaattatctttctataatcaaatctatctgctaaccagcctcctataggagctccaaatatattacctaacccataaattgtaagtagaaaacctagttgagtgtttgtacattctaatgcttttaggattggatcatataatgtatattggataaatggtataatataaactaattcccaagatattgctataataacaagttgaaacattaactttccaaactttataccgttttctttttctcccatatttaaaccctcactttttatatttattcacaagcataattgagttctttttttataacttctgcaagtatctcaacacctttaacgatttgttcttctgacattgttgtatagttaagtctcatagtattttttggaccattatttgcaaagaaggactctccagaaacataagcaactccagcatcaatggctttatccaataaatcatctacatttatactttcaggaagttcaacccatataaacattcctccatctggttctgtatatttagcttcctctgggaaatgtttcttcatagcatctaacattagcagacatcttttcttatactctgctcttattttttctatatgttcatttaagttgtatttctttaaaaattctattacttgtacttgcgaaaattgatttgactgtaaatctataccttgttttaaaagttctgccttatctatgatgtctacattaccacacatccaagcaactctaaaccctggacataatacttttgaaaatgaacctaagtataatactttatctttagtatcaagagatttaagtgtaggtagaggctctggtgtaaatcttatttctccataaggattatcttctattactatgacatcatacttattcacgacttccataaaatcttttcttctttgtaaagaccatgtttttcctgtaggattttgaaatgttggtattacatagattacctttatgttagaattttcagataataatttatctaaatcatctgttaccattccttcatcatcagtatctactcctaaaaaatcacattcataaggtctaaatgcatttattgcacctaagtaacttggattttctgtaactactatatctcctttttctagtaaaatcatagcacttaatgctatcccttgttgtgacccagtagttattataatattttctgcttttgtatcaatattttcttcttctttcattctttttactaatagatctaacaactcatcttcacctttagtaggtccatatgctagggcaaattttcccctttcattaagtactttttgagttatttcacttatctcttctattggaaataaatttgggtcaggaagccctgcagcaaaagatataacagttccaccacttgccaccttctgagctattttcttttgagaagctcttatagctgaagcttttaccatatccattctttttgcatatttcataatactttctcctccttaataataatttcttattgtgatgctaggcacgctaatgctattgaatttatttttatttcagctgtgtcagaacgtgaacctaaaattatcggatttgttgctcctaaaactatacctgcccacttagctttattaaatctaagccatgactttcctaatatattccctgcttctatatttggaaatactaataaatcaacatcaccagcaatattacttttaatacctttatgttctgctgcatgtgcatcaaatgctacatcaaatgctattggaccttccactatacactttggtatttctcccgatttttccatctctacaagtaggttggcatccactgtagattgtatcttagggtctaccatttcatttgcagtaagtatcgcagttttaggattttccatgcctatacttttcatagtaagaagtgcatttgtcattatatcttttttttgatttaagtttggcgatacatttattccactatcagtacaataaagaagtttatgatattgaggtaattcatatactgcaagcaaacttaataatcttcctgttctaagacccgtttctttatttaatatagttctcatatagacacttgtatttactaatcccttcataagaactttagcttccttatttttaactatctctacagcttttttaactgattcatcgggattttgacaacctattatttcatgaccttttaatccaatttctcttgatatactttctattttatccttgtctcctacaagaattggctttataatgtttaaatctgttgctgatttcacagcctttaatacttctttgtcttctgcaacagcaacacttacaataacaggttcaagctttttagcctcttctaataaattattaaaatcttttaacatactctttctcctaaatattaataagtttttgctatttcttctccattaagtactctaagtgctcctagagcaagtgcctccatttccatctctcctggtactatctctattggagctagatatgaaactttttctgctactcctttgactaccatttctgagtgagatatccctcctgtcaagataactctatctacattccctgaaagtgaagctccatacatagaaatttcttttgctacttgataaataaatgcatccattataagttttgccttttcatcaccctccttgattctgttttcaatttctatcatgtcctttgttcctaaataatcgtacattcccccaatcgaacttacttttgcgaccatttcatcatgagtatattttccggagtaacacaattctataagaggatatgcaagtaatccaccactcctttctggagaaaatggaccatcagacctaccaccacttccatcaatcattttgccttgtttatgtgctacaatcgatattcctgaacctaaatgagctacaataaagttataatcctcgtattttccccctagtttttgtgcaatttttcttgaaacagctttatggtttaatgcatgtaaccaacttgctttttctatgtctgatattcctgtaatcctcgatacatcatcaaattcatctacagaaactgggtctactacaaatgattgtactcctatttcatcagctatagttttagctaataatgcacctaaatttgatgcatgttccccatttatttcatttctcatatcctcaatcatttcttcactcacagtataggtaccaccttttatagccttcataagtccaccacgaccaactactgcgtcaaaagaatttatactatgattctcactacttaaaatatctactatcagttgttttctataatcatattcatcaaatactttagaaaaattttttaaatcttctcttgtatgggttatattttttttcaaaatttcattttcatcttggaaaacagaaatttttgtggatgtaccaccaggatttattactaaaactttcaatttaacaccccctagttctactatacagaacgtcgttcttgtattccggcctaaagacttcgtcctattgtccagaacgacgttctatattttattaattaaatactaacatataaaaataagtatttcaataattattttaaatatttaaaatattcattcgtagtcgtatcctgcttcaaatgcttctacatttttagaattgaatttacctttgccttgattttcaaagtattcacacataccactttcaaattcttcttttgtaaataaatccaaactctttaccatagcacctaacatgcaaatgttagcagctttttcattgcctaaattttgtgctatttcagtaacaggtacttttataacattaatgtcttctctgtactttctatccttacttactagtgattcattgacaaacatataaccattttttttcattaaactttcatacttatctactgatacgctgttcattcccaatagtatatctggattttttacacaaggatttgcaattttttcatcacttacaacaacattgcaatttgcacttcctcccctcatctcatttccataagatgggaaccatgtaattttcttttctgccttatatgcaacatacattataatttttcctgctgtaagaactccctgtcctccaaaaccagcacatataatttcattcaacatattatttcctccctaatcaataaattctccaagtggatactttggaacaagttcattttcaattctcttcatagcatctactggctttaatccccagtttgttggacatggtacaagcacttctattaagcaaaaacctttcttttctttttgtttttctagagcttttttgatgtatctttttgttgtatttatttctttagggttagttattgttcctcttgctagatatgctatatctaaatttcccataacttttacaacatcaaatgttgaaccatgatctgcgtaatttctacccgctggagtagaagctgtatattgaccttctatagtagttggagccatttgccctcctgtcattgcaaacatattattgttcataacaaggaatataacattatcatttctagtagcagctgacatagtttccccaagccctatcgcataagctccaccatctccagctattgtaaatatatatttatctggtctaactcttttcatagctgccattgctgcacccattttaccatgaggtggaacgacaacatctacattcatactaaattgaaacatatgattacaacctatatctgaacatataattgtatcttgacatatatccatttctgttaatacttctccaataattctatcgactatagagtgtccacagcctccacaaaacatattttcacacatcattattgctggtgctttcttagccataattaaaatacctcctcttgcttagcttttccatctataatctgttgagcaaaatctattaattgatttacttctgccatatattgagctgttgctactgaatatactggaaatctattatcacatgctataattacatcttccttcatctgtgccatcatgttcatttcaactgttacaagtcccttcaatgaatcacttaatttcttaaatgcttttcttgggtaaggccacaatgtttttggtcttattagacctaatttcattccttttgctctagcatctctaactgcaccttctgctattcttgatgaaataccgtatgccacaaataccacttcagcatcttctatttctatctcttcccatctttgttcatcttcttgaacttttctcattttttctatataccctttttgccatgtatcttggtcttcaaaatatgttatatcagttattactttatttttttctcctacaggtgttccttttgcagcccatggagctttatccatatcgtattctttcattggtggtgctatacaaggttctaccatttgacctattgtagcatcagaaagtataagtactggatgcatatatttttcagccaattcaaaagattcatatgccatatccatattttcttgaacactgttaggcgctaacacgattaaatgataatctccatttccaccgccttttactgcttgccaataattatcttgaccagctcctataaatccatcacctataccatatctttgcacacatgctacaactgctggcaaaccagctgatacccaatatgcaataccttcttgttttaatgaaaatcctggaccagatgaagaagtcatagctcttgctccaagtgcacttgctcccataaccatatttacactggctatttctgattcaccttggataaatactcctccaacttctttttgtctccatgccatcatttctaatatttctgattgtggtgttattggataacctgcataaaatctgcagccaccacgtatagcaccttctgctaaagcttcatttcctttaattaataaactttgcataccttttctcccctctaataaaaataatttataatatctcaaatactaaatcagggcacattgtataacaagcgccacattgaatacatttttcttcatcgactttaatagttacaaagccttttttatttgtgtagtcagaaagacttattgcatcttttttgcaagcttcaatacaaagatagcatcccttacatctttcaacactcaacttgactttttccatttctcaaatctcccctttatgtaatatttttacttaattttaaatatataatatttatattttgtataaatactatatatgcatcaattttgttctatagtatagaaccttgttctatttttattgcttaattaaaagataacacattcgcttatatatttcaataacattttaaattttaagaatatttaattttagattaaagaaaaataggctacatttaaactgatatttacaaataacaatttaaatatagcctatttttattatcgagattaaaaatcatctaaaaagttcagatatactttttgcagtttctataactcttttaatcttatactcaaagtccccttctctcattcttatagttggacctgacaaacttatggctgcaatagctttattatttttatctaagataggtgctccaatacaagttagtccatgttctagttcttcatcatctatagcatatccttgttcttttatttttgctaaaaaaagcatcatatcatcccaattatcaattgtatgttctgtatacttgtgtattggtgtttttctatatttttcaaaatctatagaatcattaaatgccataagacatttaccaactgctgaacaataacattcactacttgaaccaacggatggatttactgaaagtaattgatttgaaccatactctttatgtattatgatacttcttggagaatcttgagctctttcttctaatatagatacattaactacttcgttaaattcttgatttaattttttcgtatatggttttactatttcagtcaatgacattttttctcccacaaccatacctattgcatataaatttattcctagccaatacttaccattctctgcattttgtataacaaaacctttgttttcaagagtaaccaaagttctatgtacagtacttttatatactcccatagccttacttatttcagttattcccatttctctcttttcatgatataacagcaaaattatgtctagggctctatctaatgcatttattatttctcccatatacaaaaactcctcctgcaaatattaagtgctactcccacactctactaaatattatatattaaaattacaaaattatctatttatcttaattatattttataaaacaaaaatattatacttaatttgtaaaataaaaacaaaatactcactatgtccttattattcttacttttaatagaattattctgttatatttttatcctgactagataataatatatatatctattatacaatagatatatttttatacaagactaacaatgaggtgaaataatggataattttaaaaagatattgttaaatgaactacctaattttaaagaatattcttcaaaatttttaaatggagaaataaataaaatgcaatataagggattttctggtggatatggtgtttatgctcaaagagacaaaaaatcttttatgataagacttagagtatctgctggagttttatctcagtatcaacttaataaaatctatgaaatagctattaaacacaacttagataagatacacttaacaactagacaagctatacaattacacgatttatctataaattcaattgttgatatcatggaagaaggaataaaaaatgatatattcactagaggtggtggtggtaattatcctagaaatgtcggattatctccattatctggagttgaccctagtgaagtctttgatgttactccatatgcagttgctactgataaatattttatcaaaaatgctactacataccatttacctagaaaattaaaagtttcttattctaattgttacacagatactgctcattgtagtatacaagacttaggatttgttgctactttgaaaaatgatgaaccatatttcagagttttcttaggtggaggtctaggtaaacaacccaaagttgctttagaacttgatgaacttataaagccgaaagacgccttatattgtgttgaaggtatgattaaattctttatggattatggaaattatgaaaataaaaacagagctagggttagatatatggtcgaatcacttggtgaagaactattcttagaaaaatttaaagaatactataaattagaaaaagaaaatggtagtcttgaactcaatattgaagaaatagattactctaaacctggagttaaaatagatatacaagattctagactaatacctcaaaaacaggatggtttatacactgtatatatacatccagttggaggtattttgttaacaaaggatttaagtactttacttaaagaattagataatgttgaaaatcctatgattagactaggaatgacagagggattatatattttaaatttaaatggaaatgaagcaaaaagaatattagaaataagtaaaactattagttgtaattctcaattagaacaaagtatatcttgcataggtgttccaatttgtcaaatgggcatacaaaatagtcagaaaatgttacatgaaatcatagattattttagattacaaaataatgaagaaattttaaataaagcacctaagttatatatatcaggatgtttaaattcatgtggtgttcatcaagttggtagcataggtttatgtggtaaaaagaagaatgttgatggtatatctacagatgcatttgaattatttgttggaggcagttttgaaataggtaagactagattgggaaaatcacttggagattttaaagctagtgatattcctgaaatgctttataaaatatcggacgcatcatcaggcaatttttatgaatgggtaaattcaaatgataatattttaaacaaaataactgataagtataaaatataatttattatatttacttacaaaaagcatgggtgtctcaaaatgaactttttagtttatgagacactctttttctatgaaatcaaatatattttcatcatctcaacaatgaaaaataagactatctctattttgagacagccttatttcttataaatagtttaaattttatttataaacaattttagataaatcacaaatttctagcatagtatcatatacttgtttaagtaaagcaagtctattgttcttaatagcttcatcattatccataaccataactgtatcaaataaattatcaactactggtcttaaagatgcaaattcatctaaagcaataccatatttcttatcctttaataattcattaacttttacctttacttgtttaaattcattgtaaagtctaatttcagcatcttcttttaataaagattcatcaattttatcactttctgctttttgagctagagtagaaactctattaaatgcagtaagcatctccactaattcatctttttctagccaattattaagctctaaagctctcatatgcatatcagaaacatcatttatatcagaacttaaaacagcatcaacaacatcatatcttattcctaaatctttaaatagattttttactctctcattgaagaaattcattatttgctcaacaacttcttctttattaaaatctaattcagaataattatctaaagcatgttcaataagtacttttatatccacagcaacttttctgtccataagtatactaagtatacctaaagcttgtcttcttaaagcatatgggtcttgagaacctgttggttgtattcctatagcaaagaaacctgctattgaatccaacttatcagctattgataaggcaacccctgcattagtcttaggaagtatatctcctgcaaatcttggaagataatgttcaaaaatagcttcacttacaacatcattctctcctccaacttttgcgtattcttttcccataaaaccttgtaattcatcaaattctcctaccattccagtaactaaatctgccttagataatttagcagcccttatagtatctgccttttcatctactaaacctaaactatcaagtatatcagcacttaatttttcaagtcttaaagttttgtcgtaaatagttcctagttttacttggaatacaacagtttttaatttttctatgtagctttctaagtttctcttagtatcttctctatagaaaaataaagcatctgcaagtcttgcttctaaaactttttcatttccagctttaacattgtctattctgtaagaatcaccatttctaacagctataaagttaggtaacagttttccttctttaagtactggaaaatatctttgatgttgtttcataggagttataacaacttcttttggtagttttatataatccacatcaaattctccataaaaagcagttggatattcaactaaataagttacctcttcaagtaaatcttcatcaaattcaacttctccacctaaagaatttgctacttctatacattgttttcttatcatttcttttctcttgttttggtctaaaactatataatttttttctaatttttcaaaataatcttctatagaatcaacttctattgtactttcacctaaaaatctatgaccttttgttacattagaagatattattccttctaaatcaaactctaatactttatcatttaacaatgcaactatccatcttataggtcttgcaaatttaagattttttcctccccaacgcatagcttttgggaatactacagattttatagtctctggtaatatgtcttttagtacttctgaagtttcttttccatcttgctttatagtcgcaaatatatattcttcttttccaacttgtttaaaatatatgtcagattcgcttaatcctttgctttttataaatcctaatgctggttttgttaaattattttctgcatcaacagcaattttcttagcaggaccctttatttcctcttctaaatcactttgtctatcactcaatccttcgactactaaagtaagtcttcttggtgtcccatacgcatttattttatcaaaagctattctattttcatcaaataatttactaagattgttttttaattgttctagtgtactgcctacaaatcttgatggcatttcttcaacaccgatttcaaataaaagataatttttcattatttgtcaccgtcctttaaaagagggaatcccatttcttctctttgttttacaaaagtttctgcaacagtctttgccatatttctaactctacctataaatgaagctctttgactaactcctattgcacctcttgcgtccaatgtattaaatgcatgagagcattttaacacatagtcatatgaaggtattacaaggccattttccataagtcttaatgcttctttttcatatatatcaaacagattaaacaacatatctgcatcacataattcaaatgcgtacattgagttttcatactcagctttattaaatacttcaccataagttattttatcattccattttaaatcataaacactatcaacttcttgaatgtacatagctaatctttctaatccatatgtaatttctcctgtctcaagctcacattcaatattacctacttgttgaaaatacgtaaattgagttatttccataccatctagccaaacttcccatccaagtccccaagcaccaactgtagcagcttcccagttatcttcaacaaatcttatgtcatgctcacttgggtcaattccaatctcttttaaactttccaaatataattcttgtatattatctggagaaggttttagtataacttggaattgatgatgttgatatagtctgtttgggttttcaccatatcttccatctgctggtcttcttgaaggctctacatagcatacttgccaaggctcaggtcctaatgatcttaaaaaagtattaggattcatagttcctgcacctttttcaatatcataaggttgcatcatgatacaaccttgctttgaccagtatttttgcaacgccagtatcatctcttgaaaattcataaaaatccctcctataacaataaagcctctcgtctacacgaaaggctattttaatagttcttctacaacttttagaatatcaaattctataaaatttgtcaatgttagtgataattcttataattatcttctcttcattttttaaaagtcactttatatctatttattttcgtcttcgtcttctttattcttttcagattcttctttcataaggtcagcagttacatctttgtcatcttcttttttgtcaactactacatccttcacatcttttgctgcattagttatcatattcttcaaaacgtgaagtttttcttcattcaattcacctaaatctacaatttctccatcttcttcattttgaacttttatacgatatttacttataacagcagctgataatccaactaaagtagctaatggtacaaaagctaatccaacaactccaactgttaaaggaatgttcatcatagtttttccatctttttcaactattattctcactacactactttttctaagaagctcttttaattgaaactttatattttctccatctttgccaaatacttcttccatagtttctttagcagattttgctttacaattacaagtattttttttattttctaaatatattactgcctcaattacatctccattgcacattactaatgcttcttttgcttctgcataagttgctcctggaactctttcaaagactgaatcaaccatttcaatagttatattactactcatcattatccactcccttattattttttacactttgcaatacgtgtaatgatttaaaattaatattatcaacataaactttcaaatacttgtctagaatattctcaagttcatgtgttatatattttgatactttagctttactacatgttaaaatatcatttcttaatacatattccataagacttatagttgttaagtctaattttatattattatcaaaaagtttactacacttactacatagtataccaccttcgtagatattaaacacagaattttgtaaaattttacattcacaattaatgcatttatttactataggtttaaatcctatatagtctaaaaattttaactcgaatgctgctgttataaacctattgtctgtattatcctgtgtatacaaatacagagtctgcgcaagtaatataaatagcctattattagtctgattttcaagtatagaattttcaactaattttgtaatatatgtagcataagaaaatgcctctatatcataggatatattataaaaactttttattatttcactttgagtaaccttgtacatattaccttgtttttttaaggtaaaattgctataagaaaataattgtgatgatgaaagcaaagagctcttattttttttagctccttttgctattgcagatacttttccaagctttcttgtaaatagtgtaagtattatgtcactttccttataccttatagctttaagtactatcccctgggtgttcaggattatcatcgtcttcttttttctcccttacttcttcaatttcttcatgtatgtttttgcaatcacagaaatataaatatgcatctatactacctgtttttttaaaaacttcccaactgatattgttcatttttaaaaaacccccttcttacatttatacttatatttttagtaagaagaggataaatcatacataaagttattaaacaatttttgacaataatgccgttgttattataaagtaaactgctataccagttatatcaagagctgtagatataattggtgatgaaactgtagatgggtctgcatccattttttttaataaaacaggcataaacgcacctattgttgcacctaaaaccatatttataaataatgatattgaaacaattaatacaatgtctaactttctcataacaaagtaaattacaatacctgttattatactacacaaaagacctgtaataatacctacaataccttctctaaccacattgctaaaatttaaatccttattagataatgttattactgtaacagatgatgattgagttccaatatttccacccataccaattactacaggtataaaaaatactaatggagcatatacaggattcattatatagtctaagttagaaagtattaacgaagccaacaaccctccaaccaaggtaataattaaccaaggtaatcgtcctctaagtgctgatattatttgctctctcaatgtagggttttctttttcagcaacttctctttcatgttctgaacttcctgcaaatttatacatatcttcagttgcttcttcttccattacatcaattatatcatctactgttattattccttttaatttttcttgtctgtctactactggaattgctattaaattgtatttagatactaatcttactgcttcttctctatcttcatctacataaacagagattatattttcactcatcaaatcttctactatatttgcgtctctagctattattaattctcttaatgacaatactccaactagtttttcttcatcatcaaccacatatatataataaatagtttcagcttcttcagcttcttctctcatatggtctatagcctcaagagctgtcatatctttatttatagaaatatatccagtggtcattgttccaccagcagaatcttcatcatagaatagtaactcttttacataatcggcattctcttgattcaaaagatttattatgtgttctctttcttcttcttcaagttcactcaacttgtctgccatatctccaagagacataagttcaagtatatttttcgagtgttctacatccagtttagataaaatactaataaaaaactctacactaccttcttctaatatagaagatgccatatctaaaggaagtacttcaaataattgaattttcatgtcttcctctaaattttccattatatcgaatatatcaattatatgatattcctctattaattctcttaactccaatactttattattatcaattaatgattttacttcatataataaatcttgggaagcatccagtttcctatccatataacccacctttatttatcattatatccaaaattatttatataattttgtaaatttctccaattttctttgactttaacccataattgaagatttatttgtgaacctaaaagcaattctatatcttgtcttgctgacttacctattccttttagtttcctaccattttttcctattattattcccttatgtgaatctctttcacagtatattacagcagatacatctactatttccttatcatttctcgctttcattttttcaatttcaacagctacaccatgaggtatttcatcattaagatagtgaagaactttttctcttataagttctgctattaatactctttctggctggtctgtaatcatataatctggaaaatactttggcccttcttctaaataattttgtataacttttattaaggtatccgtattctttccttttaatgctgatattggtactatttctttaaaaataccttctctatcatacattttgattatatcaaatagctcatctttttggtctagttggtctattttgtttacaactaaaattattggtgtcttaacacttcttaaatcctctattatctttctatctccaggacctatttttttagaatcatcaactacaaataatattaaatctacatttttaaaagcttctgttgctgcctttaccataaattcacctaatttattttttggtttgtgaataccgggtgtatctaagaatactatctgcatttcttcatctgtatatactgcttgtattgtatttcttgtagtttgaggcttatcactcattatagctattttttctccaactacattattcattaaagtagattttcctacatttggtctacccactatactgacaaaacctgatttgaacattaactgtctcctaactttttatcttcttgttttaattacttaaatttatttatacttttaaatttattttaaatcatttccagagaaatagtttggcaacaaatcctttatactatgctcaaacacctctcctttagtatatcccgttattatttttatatcagaaccaaactctataattacctgcctgcatattccacatggatatgtttgctcattattttctgagttatcacttgctatagctattttatagatatccttatcaccctctgatattgctttaaaaatagctgttctttctgcacaatttgttccacctaatgatgcacattctatattacatccagtataaactttaccactcttagttaaaagagctgcacctactctaaaacctgagtaaggagcataagaatgttgtctggcatcttctgccaaccttaacaattctatgttatccacaacaactcctcctgtatacaataattaaaagttatttttatttaatactctacattatatcataaaaatttaattagcacagatttgttttattttaaatattttatgtacatttattttaattatagaacattccaagctgaaatactaatatagctatcaacacacctaataaagctccagcaatagtctcccaaaaggtatgtatttttccttcaattctactttgggcaactaatacagccattatatatgcaagagtagaggcaacaactctttcagtcataagtgtaattgcagttgctatagcaaatgctaaggcagcatgaccacttggcattcctccttttagaggagtacctgtagaagtcaatgcttttacaactacaacagctataagaaccaataatatacatatcaaggttatatgtaattctgattctcttattttataaattaatattccagatatatctgtcaatttatcataaaacaaaatatatccaactactactgaatttagtgctgccactagaacgcctccagctgcaacatcttttgctatcttagcaagaacatgatattcatcagttactaaatcaacagctttttctatagctgtattaaacatttcggcaactacaactaagcatatggacataagtaacattatcatttctaattttgaaaagttaaaaaacaaacttattataagaacagcaactgaacctaaataatgtattttcatatttctttcaaatttaaatgtatacaatatcccttctatagctgcattaaatgctttaattataccttgacgagttttttctggtttcataaaaactactcccttgttatgtttaacttatttaatatgtgttcttctttttctctcatttcttttgtattttcatctgtatcgtggtcataacctaaaagatgaaacatactatgacatattaaaaaacatacttctctttcaaaactatggttatactctatactctgttctaaggctctttcaagagatactactatgtcacctagggattcttcttctaactcaacatcctcaaaatcatcacttaaaagaggaaatgataaaacatcagtcactctatcaactcctctatattctctatttaattcatgaatctctttattatctacaaaagaaagactcacttcataattatcatcatatccttcataatctaaacattctatgattatatcctttatcttttcaattaactcctcacttacttctaatttatcttgtctatcatctagtatcaaatccattcactacacctactttttattcattaataatgctatatatctatattactacacttttactttcttttgaaagtcttttcctgcattttcacttttttacgttcttcttttttaaattcttctcttttgtcgtgcttctcataagctcttattattctctgtaccaactcatgtcttacaacatctctatctgttagcattatagacccaatacctggaacacctttaaggatctctgtagcttgtattagaccactcttcttattttgtggtaaatctgtttgagttacatctcctgtaactacagctttagagccaaatccaagtctagttaaaaacattttcatttgttcagaagtagtattttgagcttcatccaatattataaatgaattatcaagtgttctacctctcataaatgcaagtggtgcaacctcaatagtacctctttctaaatacttattaaatttatcagcacccaacatttcaaataaggcatcatatagtggtcttaaatatgggtcaactttgtcctttaaatctcctggtaaaaaacctagactctctcctgcttccacagctggtcttgtaagtataattctactaacttcatctcttttaaaagcttttactgccatagcaaccgcaagataagtctttcctgttccagcaggtccaacaccaaaagttatatcattattttctataagttttatatattctttttgacctaaagttttaggttgaacagcttttcccctttgagttatgacgattgtcccctcaagttcttttattttttgttcacttccttcaagcaaaagagataatgaataagaaatactctgcttatctaaatgcttaccatttgatacagtttggtgtaattcattcataagttttaatgcagaatctacatttttttcttctccaattaaaattatattgccttctctaagtattacatctatatttaaagtcttctctattaattttacattttcatcaaagttgccaaataactctctttcaaagttaccatctgctattgtaaatttcttttgtattatcaattgaattagtcctcctaagattttaagtttaattttattagttgttattgctattattattttgactattattactattttgattactattattttcatcagaattgttttggtctttattatccttattatcctcatcaaactcatttcttatatcatttaatggtcttttttctggattggaaggaacttcctcttcaccttcatctggtttactttcttcctttataaacctttctgcttctgacttactaagaggataaattttagcaatattttcactagtttgaactgttattaaatattctaacatatttttattaaccttaaagttatgttttacatctattattctagccgaagctgggattatgtattctaactcttttaaagctttttcagataattctttttttaactcttctttattcctttttacttcaaccttttttgtttcataaaaagtactcgtttttatctttattggaaaagtatagtttcctattgatagttttttttctttattttcaacaacataatctttatattttatattttttctcattgtaaactctttatcataaaaacttagtgtatatatatttttcttttctccagtttttttatttacagtatctacataacttgccttttttgtggactcataaaaagtacttgcccatacttctggtattgacttggtattagctccatttaataagacatctcccttttggactatgtctccagatttaataactgatttaccacttctagggattaccttttctattataccattttttaaagcaattacattacaataatttgattggtctgtagattttagggattctgccttttttgtaacagtaacaaatatatttgttccttttacattgatagataaatatgccacatcattaaattttgacatcatatggtctctaacttcttttctatcaatactcttcttatagactcctggtcttactccaaccttataaagctcatttctaagagcttctttttttataccttcaggagattgtatatatacatctgtcacaaactgcgatgtagacatcaataaaaataaagaaacaagagcacaaatccacatacctttgtgcttataaactcttttgataataaaagggaccccagttttttgctttacctttatatcaaacttacttcctctataaacattcttaaattcttttatatcttgtctatctatatgaaactccattttagtattttttattctagttacattgtaaacacttatcccatttcttataagatgatttaaaaattgttcgagtcctactccttccacaactataacatagtatccccttataaaacttatcaagtgtatctcctcctaatcaacatactcaacattgtagataatcccttttatacctatctcactatcagtaatatacttaagtgaaagtttatccccagatattttaattgttttaactttagtctttattcttattaaatcaacttcatattctaatattgatagataattttctatactaataaacgtattacttgtaacagtaataactggttgatttacttgtaaatcagtggatatttctaacataagcattacccccttaattaattttatgcttgaaataggtatttatgcactttattgatgttgtaacagattagttttaaaatttttatataataaatacctaatatctaatatattatttaaacaataaaaaggtaatcatattgataaaaaatcaacatgattacctttttattttttcttatataaaatctaaacgtatacaatttttattaatcttgttctattaaaccatatccaccagctttacgcttatacactatgtttatttcaaaattatcttggtttctaaacatatagaaattgtgtcctactagttccatttgaagtatcgcctcctcagaactcataggttttacattaaatttctttcttctttctattactatattttcatcttcttcatcatcataatcataatcatcaaattcactgctattatctataaagtcaagattttcaaatcttatgctcttattattttgaactttgtctttaactttagttttatatttgacaacttgtctacttaatttgtcacaaacaatatcaattgctgcatataagtcatcttctacatcttctgctcttattatttgaccgttaataggaattattgtaacctccactttttgtctatcctttttcgcacttactgttactttcacttctgattcaggatcaaggtatttttctaacctacttaattttccatctacgtatccttttattccgtcagttaatttcatttgtctcccagatactattatttgcataaaaacctctcccttcaagcctttccaattctaatactttaatatgttaatctttaaatacaatttttataaatttattgtatttaaattaatattattgtatatgaaaatgattatttttaatagtctatttatttttcgtttgttatgatattattaaaagtacagggtaatttacaaaatctttacattctatttattaataaaccatataaaatagttcaaaaatcctgcataaacaagccacattaaataaatcaaatttatgtatccagatctcttatctattttagaaaacttcgaaatcattattatagaaaccaaaatcattattattatatctatcaaagctgtaaatctaagtccaaatccaaaaaatagtatactccaaataaagtttaatacaagttgtaatccataataaaaaattgcatctcttaccttaggtaagttgtaaccctttcttaatattaggtatgaagatatacccatcaatatgtacaatatagtccaaactataggaaagataaaagctggtggtgcaaagcttggctttgtgagttgtaaataataggttgaaatatctgttccactgataatcattgttaagatgctacttaagtaacctattattagtggtataaatatgtttatcaaaaaattcctaatctcttttactgatataatcaaatttttccccttctttcaaaattttctttgattatagatatgctcaaatatgactcgttattcccaaaaactataaaaagcctagagatttctctctaggctatatcaatctattgtaagttttgttttaccaacttatttataagttttccgtcagctcttcctttaacttttggttggataactgacattatttttcccatatccttcatagaagttgcccctacttcggatatagtagattttacaatttcttctaactcttcttcgcttaattgttgaggtaggtactcttttaaaacttcaatttcaccttctgtttcttttattaagtcttctcttccagctttttcaaattcaactaatgcatctctacgttgcttcaattgttttgctattacatcgataattccatcttcatcaagctcgaccctattatcaacctcatactgctttatagaagctcttattaaagttactacagattttctcactgtatctttgtttttcatcgaagatttcaaatcctcttgtaacttttgcttaagggacatccccttcacctctttattcttatttactactatttcttagcgttttttcttcttgctgcttcagcttttttcttacgcttaacgcttggcttatcatagtgctctctttttctcacttctgacatgatgccagacattgcacattgacgcttgaatcttcttaaagcgctgtctaatgtttcattctctctaactcttacttctgacatttctttttccctccctccaatagcgcaattatgctgggactgtaactatgttctttttgcataatatgcattacaacctaacactttgtttattataaactaaatttttacttttatcaagtatttttatcaagaaggaactcaatttttcaataatttagtttagttttgtcccgcttcgtaattaggaagctttttaccagctaaaatatgatagtgcaaatgtttaacttcttgccctccatcacttccacaattatttatgactctgaatccagtttggtcaaaacctttctctttagctattttattaataacaacatgaatatgtgacacaatgtccatctctttatcaggaatatcaattaaactatcataatgttttttaggtacaactaatatatgatatggagcaactgggttcaagtcattaaaagctaagactctatcatcttcataaactttagttgaaggtatttctccgttcgctattttacaaaaaatacaatccattctttccacctcctatcttataaatattataatttctacatgttatagcaaaattccttctacatattcatcttttacatcatttattttcacttttaatatctgaccttgtatatttttgtcactttcaacaacaactcttatataatttgaagttaatccctcatatttattgccttctatattttgttcaaacaaaacatccagctcacggccgataaatttagttgcaaatttattaaaatttactttacttaaatttaaaagttgttcacttctaaagtgtttcatttgagggtcaacttgattttccatagttgcagctggagttccttttcttggtgaatatttaaaaatatgcatttgtgaaagctctatttcttttaaaaactcgtacgtttttttaaactcttcatttgtctctccaggaaaacctactattacatctgtagttattgccacatctggcattttacttctcaatctatctacaatagttttgtactctaaagttgtgtatcgtctattcattctttttagagtttcatcacatccactttgaagtgataaatggtaatgaggacaaactttatccatctttaaaacttcatttacaaattcatctgtaaataaaattggttcaacagaactaagcctaattctttctattttttctatctggtttatttgttttattacatcaagaagtttaatatccctatcctttaaatcttttccataagaggcaacatgtattcctgttaatacaacctctttatagccattattagccaattttttcacttcatcgactatactatcaatatctctacttctaacgcgtcctcgggcataaggaatgatacaataagtacaaaatctgtcacatccatcttgtattttcataaatgctctagtctttccattagtttggctgatttctatttcttcaaaagctttaactttcattatgtcatcaactgtactaactttcttacttgaatttatctttttaatttcttcaacaatctttcttctatcatttgtacccatgactaaatttacttcttctatatccaaaatttcttctggagatacctgagaataacatcctacaacggctattattgcatctggattcttctttttaactcgtcttatatattgacgagattttctatcactcatatgagtaactgtacatgtatttataacataaacatcagcatactcttcactattgacttgttcataaccatctttctcaaatagttctagcatagcttctgtttcatattgattaactttacacccaagtgtataaaaagctacttttttcaatttatttttctcctcctaaatcacttagttcatacaaagctattgttgatgctacaacagaagctgtctcagttcttaatattctaggccccaatgatacaacattacaattatttttttgtatttgctctatttcttcttcagaaaatccaccttctggacctataaaaattccaacactatctatattagaatcacatttttttagtgcatgttttattgaaactgttctttcattttcataagggcaaatatttacattattttttttcatatcttctaaagcttctttaaaacttaaaacacctcttaattttggtatcttacctcttttgctttgctttgctgcttcataaattattctttcccaacgttcaaattttttatcttcttttttgtcatcaactttaacaacacttctcttagtttgaactaatattatttcttctacacccacttcagttaatttttgaagtatcatttccatttttggagcttttggaagtccctggtataaccttactttaagttctgattctctatttatatcaactttttctaaaatctctaaattaactatactcttatctatattcattatctcacaaatatactcattattattcttgtcacatatttcaagtttctcacctagtttgcatcttaaaacttttgaaatatgttttacatcttcaccttctatagtgcaagttttatcttgtagatttatattatttttttcaacaaaaaatctatccattatacgtcaccatatcccttattttttaagcttagaaactattgctgaccattcacctaatttttgaacttcaactatttcaaatccattttcaattaagctttctttaacttcttctactttatccaaaattatacctgaagatataaatatagcatcttctttcataaagttttgaacatcttttgcaagtatctttattatatcagctattatatttgcaactattacatccgctttatcttttattacatcagttaaattaccatgcattacagatacacttttttcaactttattttcaagaacattttcttttgcaacttttacagccacttcatctaaatctacagctacaacttcttttgctcctaatttagctgctgctattgcaaggattccactaccacatccaatatcaaatactttagaatctttattcacatacttttctaattctctaatgcacatactagtagtttcatgtgtccctgtaccaaatgccattccagggtcaagctctatgattaaatccccatcttgcatagcataatcttcccatgtaggctttactactaccctttgtcctacttttgttggtttgtagtatgctttccatgcatttgcccaatcagcttcatttacttggtccaatgatacacttccttcacctatatctataccaaaatcttttaatcctaaaactttttgctttattatttcgacaaattccatcacatttttttcttcagaaacataagtttttataagaacatcatcttcttcattctttttaaatacttcttcttcaacataatcccagtctagttcatttttcttttggaataaaaagtcttttgggtcttctattacagctcctccagctccttgttcatatagtatattcgttataggttcaactgcttctgttgttgtttttatagttacttctatccaattattcataagtttacctctcttctctatagtaatattcctgtttttccataacttttattatatcataaatataatattttgttgttttatattattggttttaaattcaagctaataatatccttatataatagtcagaatatttaaaaatccgattagttaattttaaacctaataataaaacttctattatatctactatatcaatatttgaaatccacttagttaatcttaaacatacaaaatctccaacttataattattttcgcgatgtacctgaaacccacttagttaatcttaaacctcaaatttattatctatatacacttgtagacactctatctcacaacttatttttccttttaaaaaatagtttttacagtgggcttacagtagtactttttgtattttcaatgtctaaaggtatattatatttaaacatatgctcacttcaaaattaagcctacagtactattatactcaaacttactactagattttagtaccatgtatccttctactttgcttattaatccataataatataatctattaaatataaaccctgatacttgaatcgaatcttgttgtaactccctatcttccttataaaaatcttcttccagaataattttgtaactaacatcaacatctctaaaaattttagctgcttccttcttactatcaacaatatttttgtaaggttcaaaattaaaaattaaatccaatccatcaaaaatttctttatttataccataaatattcttaatttctttatcacaacttataaaattctcttcaaaatagtttttaactacactattatcatagtaatcatccaaaatagtttttctaatccccattgtaaaaatagagttagtttttaatatgtcctttaagatgtttttagttgtgttcttaagtttgttatcataaattttatcttcactaggtagaatataaaagtttccatattcatatttattatttctattgcatctacccattctttgtattaagctatccatagttgctaaatcacttattattatattgaaatccaaatccaaggatatttctactgattgagttgatatccaaatatcaccctctccatttaatattttactatatttctcttttttatctttgaacttaaatctactatgtaaaacatctatatctacaccaccatacttatcagataaattttcttttaaaaactcatatgttctattgactgaatcaatagtattctttattataagaattttttgtttattttctaaagcaccttcaactattgacttgatttctttttcctttataaaagaaacctttacatctttaccttcacaaatttcttcttccttgttgctctcaataaaaactatttctcctttatcagtaacattttcattactttcttcttgaaaaataattcccttgtttatcatttgctctttatatgattttggaagtgtagctgtcattaagtgaaaatcaacatctaagtacttgcatgcaaactgcataaaatatatcaaaatcaaaaacatctttggttccaataaatgtacttcatcaacagttatagatgcattttttacggctgcgaatattttttcatatcccggaaatttaaacatactaagtaataactggtcaactgttgcaattacacaaggtttacaaaaatttatactcaaatctatatcccttaatgtcaatacaaaatcatgttctccattatcttcattctctgaatataagtttatatctccatgaagtaatccaatgtaatcattactacttcttgtatctaaatcatttttattttgaaaaatattttttctataaaaactttctgctgatattttatttggcactaaaaagaattttcttttaaaagtctttctataatctgcagctgtttttcctgaacctgtaaatgcaacagtcagaacatttcttccagaaagttctctcaaccttttttgtatagtattgaactctatattatttttttctaaattaccctgactcttatatatctcatttaaaatcatatcatcaatttcttcatcagtaaaatcgttataaaattttatacctttctgtctacttgatgcactatggtctattaagttcagcatccctttatataaaatatacttaaactttctataatttaaaactgaatcatctatttgaccattgttataatcactgtctataaacatactttcacttaatttatctatgtaatcataatccaatacatcttcaccaaatttaaaatctacatttaaaatgtcatttatataactttctatatctttcagattaaactcttctttttctaaaatgcctttttcaatataatcataaatttcttcttgaactttactagtacttaacctcatataatcttcatagtttccatgatgtaacattatacttttatatatatataacttatcttcttctaacaagttcattttttctaatatatcttttaaaaatgctccagaaaatatattgtgtcttgctatcttttttaaagattttttgtcagactctaactttttcctctcttcttctgagcaactatacgatattttattattaatctccattttttgttgcataattgaattaatttttcctaaatcgtgcaaagcacaacatatttttagtatctctacatctttatctgaatatagatttagttctaatatagattctaatacttcaaataaatccttaatatgttcaactaatgtttgttcttgttgattagttcttaaattatatgacttagctaatatttctttttgcatgatatttttcatgataaacacctatctttcaaaataatttaaagccatgtaaaaacttcttttgtatcaatacatacattacatacatttaccttaatatttttaggatatataccatcattatcaacatatatataatggcaaaactcataaactctatcatctctatttgcttctaaatctttatatttataaggtaatgcaatcaatacaccttgatttattatagtctcgacattctctttatctcttaagtcaactcttacatatgtattctttaattttatattttcttttatagcatcacgagtattcataggcataacctcttttaactcaacttctttcacaaaacaccctttttcacttggtattacaaaatcttcttttcttcctaaatttgcatatttacatggactttcaagcttttttttaataaattcaagttcttcatcatccttgcaagaaataaatatagtcagttctacttctttaagaacttcatagtttaatatgctattttgagctttatgttctttatagtaatcatagtagtttccttgaagcaaaaacttttctttatctttgccttttctcatatttgtatattcattccaaaaatcaatgttctctcctcttgaaaattctagttctctatgatgatgtgttccaattattcctatatctatatcagagtttaatcttctatcacataaatacgttatcattcccattattgtggtcttagatggtaaatttaaagtacttatatattcattttgaaatacttttgggtctctatagtgagcagttggttgcttaagtttacattgtaatactttcataattcaaaaaacctcctactcttttaaataccacatattatcttctccaatttccaatctatctgctagatttttaatctcttttacagggtatttacttaaattaaacttatttaattcctttttattagaaatttttaatttgtcattgatagcaagtattgtgttactttctttaaggctataactttctatagtttctatgactccctctaaatttatctcaccactatcagcattataatctacatcatcccaaaaaaacggtacaactttatcaaaagctccacccattactgcaagtggttttaacagtactgatgaatgttttatgtttcttgtaaacacagtaattgcatctaatatatcttttactgctttttctcttaactccttactcataaattttctttcttctggtaaaagcaactttccatcttctacttctactactcctattctatcaagctccaatgttattgtataaacgtagtaatctgataaagtctcttctattgctaatgcttgtgatgttggaaagttttcatctctaagtacttcattttcttccttctcatcataatattttctaccaaattcgctacttaaaaaacctctatttgttatcaactgtgttgaacctctatatgaatttaatgacctaaaaggtattattctaagcggagaagccttacttatagaacctttatctttaagtggtatcaaataaccaaatacatcagtctctaatccattttcatctacacatcctacattttgcttaatagatggatatatatttccttttttcccaaaaataatattacttaaattccaaccatattcttggtggagcattcttcttaaatcatatgttattgtggctatactagtttttgcatgtattttttctctatattgttctttttttattggtgtataatttccatacccttggtcatatgaaagtggaactgggctttctgtcagtatagttaatgttactccttttactcttttttcattcattttaaattttcccccttttttatttcatgatttcttgaataaatagacctacattcgtatttaattctaattcagaactctgcattagaccttctacaaacccttctcctattaagattccattagaaactaacacatgcattatagtttgaaatagctgagttctatcattagacttaagtagttgaatcactttcatagaaaaattttttcttctggattcatctgtcattttattaaataagtctttacctactcttgaatatattaaattactttccatatagtttttcattttatactcctcccctccatctacaatccaacacaattttatatataaaccgatattatatgagctagatacaaaatccatttctcgagaagttccagttagttgccttaaaacacttatattatcaagtaataattcttttaaatttgataaattcccattatcaatcatttttttacccaaatttctagtattccctggctctcttgaaaaattataattatctataatatctataagttcaattttttttaataattctttatactctataatagagtcaaactttagaattatacctttattcgtatcaatatcaaacctatatagtctaatcgaacttattttttcatgcaaaagttttttataaaatgatttatctgaatacatctttcttttaagcattatcttatgatttaaaaatgctaattcccttaaatcattcgtatatgcaaaaaccattggtctttttaaatttatatataaaagacacattaagttgaaaaattcacactcaaaacaaatattactttcaacttgtccacttcttttaaagcctgatttttctgcacctctaaataaaaagttatacttagagtcctttcgctctcttaaatcaatatctagttttgttgttttatttatattacaaacattacatacactatctttttcttcatattgtgtcaaatcaagtttatctatttcatctatctctatatttgatttaattacagtatctactattctttttacatttgtttccatattttctaaactcgtgtttaatccatacttaccactatttctaacatatggaaatcttctgtttttaaaatcttttttaatcccttccttttgtttctcagttgcagaagatttatctaattcttcaataaaatttacatacgttaaattatctatattactaaatattttttctaaggtttcctttttcccatttttaaataccttaaaaagttgattttctaatatataatcagatatatacttagggtctatatattctgcagattctaaagataaataatttctatttaactcacaagtaaattttagcttataatcatttttttctagttcgttttttaaatccattagtaattcataaaagtaaacaatgccaatatctcttacaatatcacctgatctataaaatttagcttttatttctctcacctcgctactttaatatatcaaccattcctgcattttccgtccttctatatccaattcccattttatacagtgcatttaaatcttccatatttccttttaaaaaaaatgttcctgcataagcatttatatagtaatattctctcactttaaatccacgaatcttttcttttaacactctttttttgaagttaagaggtataaattccaatggctttctaagcccactacctcttatactctccagagttagattagctatatagtttaaacattctatataatttgaatcttctacatctaaatatttaccttctttattctttactattataggagacatagttttaaatataacaccattttcttttatctcgtgttctttatgtatttttatattttttattttaaatctataacctttatattctagctcctttacttttaaaattccattgtataatttactgaacatagaataattataaaaacttatattgaatattatatctccatcaacaagcaactcatttttgcttcttataagatttggtatgtagatggctgtatttatatcctttatttgcttattgttttttctttcttccccatagttaaatatatttttagcaaaatctttgttttctgcatttaaaatattttttataaaggaaactgacaacattgaattttcatttggaaatttgccattacatgactccataaaaattgaaattctgctcatattttcacctcctactttctagtataattcattattctctatttgtaatataaaaaataaaacatatcataaaatgattttttgataataaatttaattttgttttttaattttttaaatatattttactgttagttttattctttgctaaaaattaaatatacatattaaacaaatacatttagtcattttacacatttaatataataaaaaaatttgatactatatcattaaaatttaaatatcaaggagaatattatgtcagaagtaattttaaaaaatatatcaaaactttactcaaatggatttaacgcagtaaaaaatataaatatagacattaaagataaagaatttatcgttttagtaggaccatctggttgtggtaaatcgactacacttagaatgattgctggtcttgaagaaatctctgaaggagaactatacattggagataaacttgtcaatgatatagaaccaaaagatagagatatagctatggtttttcaaaactatgctttatatccccacttatctgtttacgaaaacatggcatttgcacttaaacttagaaaattgcctaaagatgaaatagacaaaaaagttaaagaagctgctaaaatattagacttactacctcttttaaataaaaaacctaaaacattatctggaggacaaagacaaagggttgccttaggacgtgcaatagttagaaatcctaaggtattcttaatggatgaacctctatccaacttagatgcaaaacttagaactgctatgagaacagagataactaagctacaccaacagcttggaactacatttatctatgtaacacacgaccaagttgaagctatgactatggctgatagaatcgtagtaatgaaggatggagtagttcagcagattgcaactccacaagatgtatacgattatccagctaatatatttgttgcaggatttattggagcaccacagatgaattttattgatgtaatattaatagaagaaaatgataaaatttatgcacaaaatgaacatattaagcttaaattgaataaagaaaaacactatgatttaataaaagacaattatattaataatgaagttgttataggtatcagaccagaagatattcatgtagaagatacttttattaaatctaatccagatacttgttttaaatcaagaattgaaataaaagaacttatgggagcagaaacttatgctcacttaaaactaggcgaaaatacgataacaattagatttgacagtaaaaacagaattaatgttggtgatgacttaacactttcagttgacaatagtagagtacacatatttgacaaagaaactactttagctataagataagaatataatcttatttttaaggagactttatggaagagttaaaagattttttagaaagacagcttaataaaaaaataaatatctatccctatgaaaaccaaaagttagatgctagtagccatttagttactttcaataatgctatttatgttattgattttctagataaaaataatcttgataatttaaaaggcaacttttatttaatttaccaatctcatatagactttgaatacctaaaaaatattttttataatttatttgaagatataaatataatacaacacaatggtttttttatagtaaattctaaatataatttagatattaatgtaactacacaaaatataattgaaactgaaacttatcaaagtacttatattttttatcttggtgaattagatagtaaagctgatttttattttagattacagttatgttctgatttactacctcatattataaaagacaatgctgaaaataagtttttaaatttgtttgaccttattagatataaaactttagatttaattaatgaggataatatactcaataaattaatagattttaataagattaaatctattgacgaagaacttctatatacaggaataaaatttataaataatgatttaaatatttctaagacatctactagtatgtttttacatagaaacacgctagtatatagattggaaaagattaatgagatacttgggtttgatttaaagaattttgaaaatgcaatgattttttatctaagtgtcaaatcttattttctctataaaaaaatttaactactaaattaagcagagatttgaaagactagttcaaatttctgcttaattttaattcaaaatattgtatacttatcgagtactctatgcttcaaaacttagaattaataaatatcaaaccagttatgttttacaaacaatatttttaaacttatcagttattagacttattaaatccataaatccactattctacttttcttaattctttctttaatataaaatttaataaaaaacttattgtacctaagaccaccataacataacctaatatctgaaattgttctgatgttatatttccttcaaataccattccaagtaaaacagttgctaaaatagaacctaaataacgactagtttgaaacagaccagaagctgtccctatactgtcacgaggactttcttcaaacatagaggattgcagggctacattaccaactccataactaatacctgctaatgataatataataccctttcctattacaggtatatggataaaaactactgaaagaagtactgcactaataaacataaagattgatgatgtaacaagaggaaatctagttccagatttatctatccattttccagttaatggagatataaatatacctataccagacataaatagcataaataatccagtcgactttgcactataatgtaaggcatcttgaaaataactaggaagaccaaaaaacaaaatataattaaagaaatttaatataataaattgcaagtaaacttttgacaatttaggattacttacaaaaagcttaatatctataaatggcaattttgttctcaattcatgccaaataaaaagacacatcagtattataccaaatacaagttgttctaagttaaaagattccttcatagatagcaaaaatagtaatataaaaatcattgcaattgaaaatagaagtatgccaataatatctaatcttgacaaaacattttttaaagtttcttttatagatttcttttcttttacttcttttgggaataaaaaataccctaagcatatagaaaccaaaacaacaggtatatttacaagaaatatagcatgccatcctcctaagtccaacaataatcctccaagtgtcggacctaatcctgctgtagttgaagcaaaaatggttagaactgctaatgcagaagattgtctttcttttatattattttgtataagagcaactccagatggatatagggtacttgttccaattgcttgaattactcttataaaaatcaatataaagaatgattgaacaagtggtactatggatgctgataaaattacaagcatcaaaccactcaaaaataagacctttctacctattaaatctcctatcttacctgaaactggttgtgcaatagcactagctaggtaaaatgctgaaacaatccaagatacagttgtaaaactaatatgaaaatcattttgtatactatgtaaagcaagtgaaatcatagaagaattaagaggattcagcatagttcctgaacctattgctatcaaaaaaagcgttcttctagcatttgttttacccatatatcatcacgcctccaataagcagttcatttacattataaaaaagctgctcctataattcctgcgtctgaacctaaagttgcacatgtaattgtagctatatcttctgttttgtataatacaaattttcttaccaaatcttctattccatcaagtattatatcgctagatttagaaatgcctcctcctatagatataatttctgggtctaaagaatttattgtgtttgcaaaagtttttgctaaataatctttaaatctatttattactttaattgccactaaatcattttctctatatgcatcaaacaccatctttgcatttacattttctaaatttccctctgccaaatctaaaatcctactcttttctccttcttctatcagtttttgagaatactttataattgcagttgctgaacaaaaagtttctacacaaccattatttccacaattacaattaaaatagttttctcctataatttgatgacctatttctgaacccaatccatgtgctccagaaaagactttttgattaattactattcctccacctacaccagttcctaaagtatataatactccaacattagcacctttcatacttccaaactttgcttctccaagtgctgctactgttgcatcattttctccatgaatttcagcatctggaaatcttctttttaactctttattaaaagcttttttattccattttaaatttacacaagttactaatccttctttatttataaaacctggaacaccaaatccaatagattttatgtcactcatagtaagtttattatcttccaacaacttataaatcattatttttatgtcattaagtattccttcaaagcctttttcaattactgttttacactctgacctaaaaattatcttcccatagttatcaactactcctgcttgtatacctgttcctcctatgtctacacctatataatacatctcttttcacctttctcttttgaatcatttaattttatctatattttattatatatatagtatattaaaatgtgacactatgcaaatttttcataaaagtttatgaacaaagcaaaaacatcctctcacagtatattttactatgagaagatgtctattttattaattattttaatttggcaagtgttcaaaacaaactatatttaaagcaagtattttaaacctttgtctttacttatttttttatctacaaccttatttataattaaacatcaaacaaatcttaagcacatttttagttggtataaactaactttctataaaaaacaatctcaatgttttagcaatttatactaaaaatttttcatagattataagtatatttctttacatatacccaactagacacatattcctttacatacacatctagcacaataaccaataccatatacatatttctttacacatgtatatactaaaagtaattcacaactaggtttccctaattacattctaatcagatataccctttataaaaattttaactcatacaaaagatttaaaaattagataccttgtctatataatattactattttactactaaaagtttgagtctaggtaattacaataattatcccagctcatgagtttttccagtacttaatctagcactaaaagtatctaattttattttgtatattacaataaagttttcttcatcatttggcagtgccacatccgttcccactggaatcacccctttcttttatttgattatattatagcacattatatattttaggacaagtatttttcagaaaattatttatattcagttttattttatgcacatttattttttatacaaaaatagccaatataaaaatcataatatctcctttgacaatcttataaataactaagatttcaaaaatatgattatatattggctactttaactactttttcttaaacatatcttctatcttttgtccgaaggttttcttcttttcgtggacgttcgacccacactccttcgcaaattctctcaatagttctttttgcttatcgtttaattttttaggaatttcaactacaaccttaacatattggtctcctcttgaattacctctaattctagggattcctttctctttaagtctaaatacagttccagtttgtgtcccctctggcacactatatttaacttttccatccaaagtaggtacttctatctcatcacctaaagttgcttgaacaaatgtaattggcatttcaaaataaatatcatttccatctctagtaaatagtggatgtgacttaacattaactacaatatataagtctcctcttggagcacctttttctcctacttcaccttgaccagaaagttttatcatttgaccatcatctataccagcaggtatatctacttctatagtcttaacttttcttgtatttccagttccatgacatttactacatggagattcaatcacttctccagttccattacaggcactacatggtcttgaacttgctatattaccaaatggagttctttgaacagttctaacttggccagttccattacaagttgaacaagttttctttgatgttcctggttttgctccagttccattacattcttcacactcttcacttctatttacttttatagacatctttttaccaaatgcagcttcttcaaaagatatagtaacactctgtcttatatctgcaccacgttgaggccctcttcttcttgctcttccacctccgaagcttcctccaaacatgtcaccaaatatatctccgaacatatcttcaaaaccaccaaagccttgaccgccaaatcctccttgaccaccaaaaccaccttgaccatttaatccatcatgtccaaactggtcataagtttttctctttgtatcatcagatagaacttcataagcttcatttatctctttaaatttttcttccgcctctttatctccaggatttctatctggatggtacttcattgctaattttctataagctttttttatctcttgagcttctgcatctttactgatacctaagacttcataataatccctttttgtactcaaaaattgacaccaccttcattttacaaaacgatagcttgtagaataataaactacaagctatcattaattcttatattctactttaagttatataatctatgatatattatattctttatgatgtgtattgtccatatatctttaacatctatatgattttcacaaatcatatatgttccaattatcatttagtgttacatattatatagcttatttatcttcatctacttctttaaagtcagcatctactacattgtcatctttaggtccattgtcttgtgcttgttctgcaccttgtgccgcttgttgttcttgagctgctttttggtacatttcttgagatactttttggaacttagtcattacttcatctgtagctttcttaagttcttctgctgtagcatcttgattatcttttacagcttttaagtctgctatagctttttctatatcctctttttcacctgaacttattttatctccaagttcatttaaagttttttcagtttgatatatagtagattcagcttgattgaatgcttctattttttctttcttttgtttgtcagcttctgcattcatttctgcttcttttatcttttgctctatttctgcttctgataaattagtgtttgatgttatagttattttttgctcttttcctgtacctaaatctttagctgaaacattaactataccatttgcatctatatcaaaagtaacttctatttgaggtattcctctttgtgctggtggtatatctgttaattggaatcttcctaaagttgtattgtcataagccatacttctttcaccttgaagaacatgtatatcaacagctgtttggttatcagcagcagttgagaatatttgagacttcttagttggtattgtagtatttctttctattatcttagtcattacattacccatagtttctataccaagagataatggagtaacatctagtaataataaatctttaacatcccctgctaaaactccagcttgtatagaagcacctgctgcaacacactcatctgggtttatacctttatgaggttcttttcctataaacttcttaacagcttcttgtactgctggtattcttgtagaaccacctactaataatacatcatctatatcacctgtagaaagtcctgcatcttgtaaagctgtcttagttggttccatagttttttcaactaaacctctagttaattcttcaaatttagctcttgataaatctatatttaagtgttttggtccttctgctgtagcagttatgaaaggtaagtttatgtttgaactcattgttgatgataattctttcttagccttttctgctgcttcttttaatctttgaagagccattttatcatttcttaaatctacaccttcagcttttttaaattcatctgctaaataatctattactatttggtcaaagtcatctccacctaatctattgttaccagctgtagctaaaacttcaaaagttccatctcctatttcaagtatagatacgtcaaaagttcctccacctaagtcaaatactaatattttcttttcttggtctaatttatccataccataagcaagagctgctgctgttggctcatttattattctcttaacatcaagccctgctattctaccagcatctttagtcgcttgtctttgagcatctgtaaagtaagctggtactgttataactgcttctgttactgtttgtcctaagtaactttctgcatctgattttaatttttgtaatattattgctgatatttcttgtggagtatatgattttccatctatatttactttataatcagttcccatatgagtttttatagaagttattgttttatctgcatttgtaactgcttgtctttttgcaggttctccaactattctctcaccatcttttgtaaatgctactactgatggagtagttctcataccttcactatttgctattatttgtgcttctccaccttctaacactgcaacacatgaatttgttgttcctaaatctattcctattatttttcccatgactaaaatcctcctcgagtaattatataattaagttttacttattttaatattttatattaggttaaataatttaacctttaatttatacttagcaagaaactttaaccattgaaggtcttacaactttagttcctagcttatatcctttttgaagtaccattactatttgatttgcttcaactccatctacactttcttgcataactgctagatgtagattagggtcaaattccttagattctgcttctatttcttctactccaaattttaccaaagtgtctattaattgtttatgtacaaggcttatacccttatacatagtatcttccttatcttcacatgcatctaaggctctttccatactatctataactggtatcaactcagttattattttttcatttgcaaatacgcctattgtctctttctcttgttgagttcttcttctgtagtttgcatattcggcttgaagtctttgatatttatcatttaattcatccaactcatcctgcaattttttttctgctaacttagaatttatatctgttacattttcatcatcaacttctttttcatcagttttttcacttgatgtttcacattcttcattaacaacttcctcttctaactctacttgagtttccgattcttggttaatagaagtatcattttcttctcttacttcctgttgctcattttttttatccaagactttacacctcgcaatttaaaatttctttactttctattaattaataaactcatataatttattatagagtaaattctagcataatccattctggtagggcctataaagcttattcgcccaaccaagtctctatctacattataagttgctgtaactatactacaatcctgtgccagttcacaatcattatcactaccaattattatatttagattgtctttttgtattccctttgatttaattatgtcagctattgtttcctttttttccaacatatttaaaaatgactttgcttttaatacatcattaaattctggataactaaatatgttagtagctccatttaatgatagagaaaaatcttcttctttcatatttgagttcaaagcatttaaaagctcatctataagtccagaatactcacttatttcgtatttaataaaagcaattagattatcatccaaatctgttatacttttacctaaaagcttccttgtaagattatcagaaatcaaatttaacttagattgatctaaatatacattagttgtaaggttagctttttttaagtcccctttatctgttacaactataagtaaaatattattgtcattcatagcaaccaactgtatgtgctttataacactttgatttattaaactcttagtaactgctacagttgtatagtttgttagttgcgataatagcttagaggtttcatgaatcaattcttttatatgatttatattatgattcatacattgttcaataagaatcttatcattatcatccaattcgcttttactcataagagagtttacatataacttatagcctttttcagatggaactctacccgcagaagtatgaggctgaattaaataccctaattcttcaaggtcagccatttcatttcttatggtagcagcactaacacctaaatcatgtcttttagatattgttctagaacctatagcttcagctgtttctatataatctttaactatagctttgaggatatttaattttctttcatttaattccatattattatacctcctagctgttagcactcactaagttcgagtgctaaaaagattatatatattatataccattataaatttattttgtcaacaccttaaaaattattccataaattctataaatacactattagatatttctcttcctttttgagttaattgtataccttcaaagctctgatttataagctttctagctaatagcatttctatttgcttattatacttctctctaaaatctattccaaatttttttttaaaatcttcaaattttatgcctttattcattctaagccccataaatatcttttcttctatcatatctttctcagaaagaatttcattttcttgtattggtttttctctttttaccaaacttaaatgataatcttctaaagattctacattattgtatctgttctcattaatatagccagaagctcctgctccaatccctatataatgttcacattcccaatataaaatattatgctcacaattatagccttcttttgagtaatttgatatttcatattgattatatccttttgactttaagtagtttattgtatactcatacatttctatatctacattttcatctataagctcaaatttattactttcatacatattatatagttcagttccttcttctagtataagggaatacgctgatatatgtgttggatttaagtgtacaactttttcaagagtttccttccagtcacatagagtttgatttggaagactgtacattaaatctacattaatatttttaaaacctacacttaatgcatctttatagtttttctcaaattcttcataagtatgtattcttcctataaaattcaaatgcttttcttgaatggcctgtagccctatactaagtctatttatgccaatctctttcatagtttttaatttttctaatgttaatgtcccaggattacactctatagttatttctgcattctcatctatatcaaacatttcttttatacttataaatacttctcttatttcatcagatgttagtatactaggtgtacctccccctacaaatatactcgttattttgtcatttttatttagactacagcattctttatttttatatttattatctttatataatttattactatataatttcatttctatttttaagtcttctatatatcttttttttgaatctatgtccattttataagaattaaaatcacaatacttacattttttcacacaaaatggaatatgtacataaagtcctagcattttttattcctcatttcttaaattatcttaaagcatcaattactaaattataaatcaaacaaaataacacatcaagtaatatataatgcttatattgtataacagtataaaaaatttggataaaagttaattttcacctttacccaaatttatctaacttaaattaagtagttatctttttttcatataataataaactggtaaacctaatagtgttataaatattccacctaaagatataattgttgaagtcaatatttgatttattattacaaacagtccacctagtatagctataattggtattattggatataaagggactttatatggtctgtgtaaatctggcttttgtcttctaagcctcataacacctataaaagtcaatacataaaatacccatattgaaaatatagttaagtctgtcaaaagattaaattgaccagataatgcatatacacaggctaacacagttataagtagtattgaatttacaggagaacctccagaatttacttttaaaagagttttagatgctggtaaagttcccatttcagctaatgtataaggtatccttgaacctgttaataaatatccattcaatgtcccaaatactgatattaatatacccacagttattacttttccacctatatttccaaacaatcttgttgctactaatgtagctggggaagtaactgttgctaattcacttgctggtactacccaaagataagctatatttattataatataaactgccataactaatgataaaccaccaactattgctcttggtaaatctttctctggagacttcatttctcctgatatagctccaacatttatccaaccatcatatgcaaacaaagtagctattaatacttgtccaagtgcatttgatgcatttacaccatctcctacaaatggatttaatacttcactactttgacctttaataaatccaaagactattattaaaattaaaggtatcatctttccaatagtggctactgtctgaacttttcctcctaaggatgaacctattatatttaataacgctaaaaatagtataactccaattgctataggaagtacatttgccatattatttgggctcattcctaaaagttcagatgcttgttgagcaaatattactcctaatgctgctgatgtacctgggaaaaataatacagtttgcatccatccagttaaaaagcctaacttttctccatatatttcttcgatataaatcatcataccaccagtttttggtatagcagctgaaatttctgtagctgtaagcccagcagttattgttataaaaccacctaaaagccacgctataatacctagacctggagctccattagttgtagtgtatattgcttgtggcttaaaaaaaactcccgaacctataaccatacctacaacagtagaaagagccgctgaaagaccaatagtcttttgtagttgagtatgcatactgtccctcctcactgttttacagtatataaaatattaattttataaatttatggttttagtattcccaaagtttttttttatattagtctatagtcctagagtaaatgctatgcgtttaaaaatcatacaatcgtaacttctaaaatattctctaaaaattatttattttatctaaataagtattttcttctataattttttaaagtaattaaattttttatatttgaatctaaaatgtatatatatttaatgctttttcttttagtatttctttttcatttaattctggattatttatgactatttcaagcatcttatttaaaatatgtcctatatctttacctggttttatacctatagatatcaaatcttttccattaatagctaaatctttaagattaaagcactccttttgatttattatatgtttaaattctttttcacactcaataagatttaatatcttttgttttgcatactttgggtttttggcaagtgtatcagcccaattaacttttattaaatcttcaaataattcaacatcttcaagtttatttaataactttttaattatcttccttttaggttctattctataatcatgatattgtattaatattaaaactttattaatagtataattatcatacttaagtcttctcaaaatcttctttgcaatctttacagattctctactatgagtataaaaatggtcaacaccatttttatcagttgttttagttacttttttacctaaatcatgaaacaacattgtaagttttaaatacagttcatcttcaattacttctgtagatattaaagtatgtttttgtacatcatagatgtgatatggattgtgttgagtaacatcttctaattcacatatttcaggaattataaatttcaacaaacctgttgattttaataagtttaatttagatgaatcagatactaatattttattaaactctgtctggattctttcgatagaaacattttttatcaaatctgcttttttatgaatactttgcttagtaccttcagctattttaaaattaagttgtgctgaaaatctaactgccctaagcattctaagtgcatcttcttcaaatctatctactggatttccaacacaacgtatatacttattttgtatatcttcatagccattaaatgggtcgactaatcctgtctttgaattgtatgcaattgaattgatagtaaaatctcttcttgacaagtccttaactatgttatttgtaaattctattgaatctggatgtctaccatcactataatttccatcaattctataagttgtcacttcaaatggttcatgttcaatcataactgttacagtcccatgttgtataccagttggaattgttttttcaaataattctactaccacttctggtctagcactagttgttatatcccaatcgtttggaactctttctaataaacaatctctaacgcatcctccaactacataagcttcataaccattcgtttctaattctttaattatatagtctacttttttaggaatttctatattaatcataaatatcacctttttattcttctttaatatattcttacttatattctctatgagtttacttaaaatataccacaaaaaagctagattaatttagaaataattctaaaatcactctagcttttaaatatatttatctaaatttataagaatttattcatctagtttaagtacagacataaatgctttttgaggaacttcaacagaaccaatttgtctcatacgcttcttaccttctttttgcttttcaagaagtttcttcttacgagatatatccccaccataacatttagcaagaacatcttttcttagagcgcttattgtttctcttgcaataaccttattaccaacagcagcttgtataggtatagcaaactgatgtcttggaatttctccttttaatttctcacacattgcctttcctctagggaaagcacgtgtctcatggacaataaaactaagtgcatccacttgttctttattgattaatatatcaagttttacaagtgtagatgctacataacctttaacctcataatcaagagaaccataacctctagttctcgattttaaagcatcaaagaaatcgtaaacaacttcattgagaggaaggtcatagtgaagcattactcttctctcatctatatattccatatttaacatatttccacgtctttcctggcaaagctccataacaacacccacatagtctttaggaactattatatctccttttactataggctcttctatcatctttatctcagatggttctggtaagtttgcaggattttgtatcattacaacctctccatccatttttgtaactctatatataacagatggagctgtagtaattatatcaaggttaaattctctctcaagtctttcttgcattatctccatatgtaaaagacctaagaaaccacatctaaaaccaaatcctagtgctgctgaagtctcagcttcatattcaagtgcagcatcatttacttgaagcttttcaagagcatctctaacattctcatacttttctccttctcctggatatataccacaatataccattggagtagcttttttgtatcctggtaaaggttcttctgtaggattatttgaatctgttattgtatcaccaacacgacaacttcttatatcttttatactagcagcaatataaccaacatcacctgctgataattcactaagttcagtttgacctggagccataacaccaacttcagttacctcaaactttttattggtattcatcatttttattgtcataccctttttaacagttccttcaaatactctaacataagctacaacacctttgtaagcatcatagtaagaatcgaatattaatgcctttaatggagcttcattatctcccttaggtggaggaacattttttacaatatcttctaaaacatcttctatgtttaaaccagttttagctgaaataagaggagcttcacttgaatcaagccctattaaatcttctatttcattttttacttcctctggtcttgcacttggtaaatctattttatttattattggtaatatttctaaatcttggtctatagcaagataaacattggctaaagtttgtgcctcaacaccttgagctgcatcaactactaatagtgctccttcacatgcagctaaacttcttgatacctcatagttaaagtctacatgtccaggtgtatctataagatttaaataatattcatttccatccttcgctttatacattaatcttatgttttgaagctttatagtgattcctctttctctttcaaggtccatattgtcaagtaattgacttttcatgtctctttcactaacaagcccagtttgttgtattaatctatcagctaaggtagactttccatggtctatatgtgcaattatactaaaatttctagttctactttgtttattgtccaccttaaaattccctcctcttgattattcttatagttattattttacattatctaaaaactctttatataccaaatttaaaatttttgaatataaactaattggcactaaacaaaattatccacattatatgtggattatcaagtctaacactaaatattatataatatcgtaaacttaaagtaaatcctataaaatacagttaatgaatttttattttatacattaaaaatatataactaaaataaggcttattttaatcaataaaccttattcacttattactacttattaaatttttttatgatttcatgtatatcaaaatttggtatgtcaaaatcaaattttgttatatcaaatttaatacttggaaaatcatattgtttcattcctagcatactttttgcattactgtctactataaatacacaaactgatgtacctataatcatagtaatcaaaaataagattctcataatatacttgtattttcttagtttacttttactttctatatttttttctaatcggctcatttagcatgctcctaattataacttaaagctctaatttttttgtttaaaatattcatctaaaatctcggctaaatactttgtagtagccttagattcttctacacttgttgcgttattccctatttctactaacatatgattcttaactgcaaactgattgaatctagcatagtctttttctactattggagatactagaccaggatactttttctcagcaaaagcagttatatcttctgctaaagctctaagttgttttctatttgtatttttacctcctacaacaaagaagaactttgatactctctctccatttatcatagttgtatattttaaatggtctttttccttagtggctggattagttaaatccctagcatctctatgtaagtctatcgctatatccactgagttatatttaggtaatatactttgtattgtttttaagctacttgcataagagttattataagatggatagtcatggtatttagtagtatggactacaccccatcctttgctatctaaagcactagttaatgcacttcctacttccattactgaatttttcttatctcttgaatgataatttccatcaggtgaatttgaataagtctcacatccatgagtatgatatatcaaaattcttggattttctttggttactcttaaatcatccttataatctgaactagatgttgtgttagtttcagttgtgtctgaattttttgactcaatatctggaacattttctttaccaacataaagttttatatattctttttcactctcttttttattatcaactttacttgcatctttagatttagtgttttcttctttactttcttccttattttctttgcttgtttctttatttttattattctttttattttctgtatcatttccttcgactttagcttctggataagatgaatttactaaaaactttaaaaaatcatcctgattcaaagctaatgattttcctggtaaaatgcatgctaatataaaagtcaaggttactactttaatgcattttttaaacataattgctcctccttattttataccaatctacctggatgtaaagacctatttaagccttcacttattattatagatagattttcgattgtatcatctatatcctttggtgttactattaagttcttgtcatatgggtctaacgaatcttttattagatgatatttttcttcttctttaagttttttcaacatttcataaaaactttctgtttcttctgattgagctattaaattgtctattgccatatctaagacatctattgtaagagttgctgcatcaaccaccgttggaacgcctattgcaataacatccacgcctaaagtttctttagttagagattttctagtattgccaacacctccaccaggtgatattcctgctgttgatatctgtatagtagagtttactctttccatttttcttgaagccaatgcgtctattgctactactctatctggttttactttttcaaccaatgactttactatttcactagtttctattccagtaacacccataactcctgggcttaaagctgatacctcagtgaaatcatcatcatagtctttattataatttttaaaaagatgtctagttacaagtgtttttgatacactctttggtcctaacgcatcagaagtaatatttctatttccaagaccaattaccagggtttttttatttttgtcttggccaaatatatctactaactcctcttttaaataacttatcatttcttctctcgactcatcatcatcaaacttcataagattactttccagagttatatactttcctatatctttattcattatctctgcgccttgcctgtctattacttcaactttagttacaatgcaattttctaattctttagtttctatttttacaccaggaatactacttccttcttgagacttttcacacatttcactagcttctaaagctaaatctgttcttacattaatcatataaacctccagtataaattaaatgctaattataattgttaacaaaatttagtattttataacaagaaattgtaaatttatttaaaacaagtaaaattaaggctttcaatgtaagaaaattgggtttagtcagtgatttgtcagtaaactttcttatctatcatttatttacaagcaaaaaaaggtagcaactatttatataggcgctacctttaatctatttataattttcctattaagctttcactaatatattaactaaaataacttttttatatttatacctaatttatttactatataaaaaaacagcaataattatacaataatcacctaacacctttattccttttggaaaaatggttctgcaatttccaaccattcatttggaagataaagcgataaatacccatgattatagcccttagcttcataaatctcacaagagggtacataagactgaaacatttttgcagattttttaacgcacttcatttctttttctccataccagtacattacttgtgctgtggtttttttaacattctctttaagtgtatagttcatcatataagtacgatacatattatagaatgtttcttttcttacatgtggcatatctgtcatataatacgcttttatttcatctggatattgcatattttcaggtaacaattttggcatcatagcaatttgaaagcgacaagccttctcactaaacaaaagtcctccaaaaaatcgaataccagcaatacaaaaccttgccataagaggtcttgggtagcaaatactaccatcaataattgcttttttagtaatattaggttttcgagataaaagttccatgacaatttgaccaccaagtgataccccacacaaagcgaaaagatgtccactgcaattttcatctatatatgatatcaacttatctgctgtatcctctgtagaaatgtatgttgtttcatattcttctccatgaccatccaatgtaggaagtatcacatgatagttgttagacaaaacttctgcttgtcgcaaatagttccaccacgcattccctcccccatgaatcaacataatatgtggtttgtttttatctccaaattcatgaaatttcatatacaacctccttttataaaaataagattcatgttattttgttttatcattatcaaccacaggtggagaagatataattgaaagttttctaagttttagatttgatttaggcttttgttctatatatggtttcaataaatcagctatacttttaagaagattttcatattcattatcactcatatatagtaatgctgaagagaaaaatacattatcctttttatggtcttgctcttttctgctaaagtattcattcatttcctgcatcagacctacataaaatgctgtagaaagtgcaacgaaggtctctccttccatagatgttgtatattcctttagtgcataaaccttttcaatagtaccacgcacacgattttctttaattacttcaatcatattgttctcttctaaaatttttacatggtgataaactgttgcacgaggaatatcatttaaatactttacaatatcagatgtgcgagcactgccatgaagtcgaatatattgtaagatacgaagccttgcaggatttaaaattagttttgctatgtccatcttatcagccctttctttagtctataaaaatattatagtctatttttttagactattcaagtctatgatataagtagtaattacaactataataaatgctacaaatgctattctatataaacactgagattaattacatataaccttctaacatattagttatattgtttgatgcatctatcatacatactaatgaaaaaaattatcttgattattggaaaaattatcttaattaagcatataaatttatatttttataatttttcattaaatttacaaaaatgagtaatttcttgtattttcttataattattggaaatactatcaaaatgtatgttaatagtttgtattatctcaaaatatttgttacaaaaataaaatattaatttatatatgtcaaaatatttaaaacacaaaatataccaatttaaaaacaagatattgcaaattatttatacacaatttacagtctaaaaaatcaaaataaaaaacattattaaaatatataaataataatccttgatttttagatttatttctgttaaaatctaatatgttgacgatgaatatgataaaaaaatacagggaggtgaacacggtggcaaatataaaatcagctaagaaaagaataagtgttatcgaaaagaaaactgctttaaatagagttagaaaatctcaaataaaaactgcaataagaagattcgaagatgctgttgcagctggaaacagagaggatgctgttgcaaagttccaatacgctcaaaaaagaatataccaagtagcttctaaaggaactatacataagaatgctgcagctagaaaagtagctaaattagctcaaaaattaaacggtatgaacgcttaattaccagtttatatttcttatatataataacccctatgtaggggttttttattttgtaaatttatacaataaaaaataaatagttagacatattatagttgattgtatatcaaacttaatttagcttacatctactctgaactataacatatcttgctatttattttttattaatatatagattttttaaattgcttctcttttacagtatctactaaccaacatttcaactgctaaagtatctcttataagacctgtttttattttataatcactttctaatatatagtttaatatttccacaattatatcatcagaaaaatttttagtttgctttaatgcttttcctacaacaaattgatgcatttttaatttatcagctataagttttgttgaatatccatcaagttgtaactgtcttacttgcataattattttaaattgtcttgctatcatagaaaatatacctaatacagattcgccttcttgtatcatatcatttaatattttcattgcattagaagcattttgttctccaatataatcgattaatttaaatatatcattctcaacttttttttgagataatttatcaattacgtcattggttacattattccctttaccaacaaaggaacttattttatttatttcattttctaaatcagataatgtcttttcactgctcttatctctgtatccttcttgttcaataaaatacatgatttgagaattatctattataacatcatttaaagcaaaagatttttttatccatttaaataaatccatatcagaaagcttatcacaatcaaaaacaattccattgtttcctattttcttaactaatgattttcttttgtctacatctccatatacaacaaaaactatagttgtagtgtctggaatattatctaaatgctctattaagtatttctcatcactatctgtaaaattctttttctttccttttaatagttcgaagtcttttattattactatctttctatcatccataaatggaagtgtttctatagagcttataagctgatttaagactatttccttcccatctattatatctaaattaaaatcaagcattccttcgtttagactatctttaaatgcttttattgcattctcaattaaataatactctcttccataaaaaagatacattttttcaaagtttttctcttttacattccttataatatccttgtaattcattctcttgctcctttatctcttttccttctatgtaaaatatgtaaaaaaacactcctatgtaataaataacaacaatataaaatttaggactttctatattaatgtatgcaaaacttaaattgctgattttttctagtaaaaaaaatatgctttctatcaatgtactattaaaaaaagatataattttagctattactacacttactttaaatacgattaaacttgcaatacttaaatacattattactcccacaaatggtactataattaaatttcctataattgaaagcaatggtatacctttaaatgtataataaattataggtaaagttaatatatttgatgatattgtcaatgataccatacttaattttataatactatttattttattatagaatattaatatagaaagtgtagctaaaaaagacaattgaaaacttacattatatataacataggggttattcataattaaaattatcccaattagagacaatgctgatattccatctttctttctatcaataaatattgataaataaaaaatcataacaaatgctatagacctaattatggatggagacgcacctaccattatacaatataaagttataaaaatcgacagtattaataatttatacaatttatttatacctcttaatagaaaggatataattacacataatattcctgtatgaagacctgatatagatattacatgactagttccagttctagtaaaaatttctttttgttcctcagtcaaattttcaacttctgctaatagtatagaatttataaaatctgagtttttcttatataagtacctataagttttactaatataaaactttatttcccctattaaagagtaaagtttatttttatcaataattttatagttatttatatacactatacctttatatccagtactttttatataccttccataatcaaaatcatcatacttcattttatctaaacttttgaatttacctgtaatattaactttctgaccaatcttcaaatttttattttttgtataatcatttattagaaaaacccctaccttgtactgattgtatcttttcttttcaatttttcctttgacaaccccttgtatagttattatcttatcattaagttcttcgtcgttttttgtgttatttgtaatgataaatgatatagctaccacaaacattaatataattaataatggtcttcttatttgaattataatcactcccatataaaagtatattatttagattattttcaaatagaaaatttttaaacaagataaattgttatctaaacaaaaaaatacgtcaaaagatttttaaaatcttttaacgtattctacctatatatattcatttatataggtattttttttagaaaaaatacaattaagtgtttctagtgtttcttctgaaacatcttttatatcatttaagaaaatagcttcatttacatctatataagaaaatgataactgtgttaaggtatttatatctaatttaatatcaaaatcttcttgaggcttttctgcaccttttttatctaactgctctacagataccttcttattctgtatagaaattttaaatagaccattattttcatctataaacttgtcttctattaataaattaaatgagctattaatatccttctcaatatctatatcttcaataaacttctttacatttataactcttcccatcataaaaggttttatttttatatcactatctttagggttgtctaatataaatcttatcttatctattgtaggagtagatatagtaactatcttacattgagtattgtgattatatataaatttaagcattgatttaagggcatctatatttttataaaataactctctgacaaacattttatcttcctgaagaaaataaactatatatccatctttttcatttccttcatgaatgtataaaaatccatcttcactttgaatctctttaaataagttttcataataatgttcatcttttaacacattaccattaacctcatttaaaaaagttctatctattcgtatcaaatcatcaatttgtgataaattagactttatcatttttccacttgacttaaaattttttaaatcatctgtgttaatagtatattcaatctggtcgtaacaatgctcatatccaaatcttctataaagtctatagtcaataggcatcaatatagaaactaattgcccttttttatacaattcgtttaaagtaaatttcattactttgttcatatatccagctcctcttccctctggaagtgtagaaactcctactacatatgatgtattatataccttgctatttagtaataacttatactgatttagctgaagagaagaaataatttttccttcatctaaagctactacagtattttcagatttatatttatcattaaaatagtacttcataaaactctccgtatcgttaaaacaataactccaaatctcttttatactttctatctcttcttctttagcatacctaatctccatatagtctattaagcctccctaacactgtacttttcaacaaatctgcaaggatgataagaaagtttagcttttcttaatccttcaatacctaaatcttcttctctatttacaaactcaacgtccttaaattcacttaccaaaaattgttgatttataaatggatacagacctcttatatcgggattagctttttctatatgaatcaatgccatatttggatttaaaagttctcctatactaaaagcctctaattttccatccacataaacaccaaacacttttaccttatcttttaatatgtcataatggttaaatatctttttgatacctattaattcgtcatccatactttcatcaaattcattattttcttccttattactttcccattccttcattagtactaaacactcgtcaaagttttctttatctaataatttagcttcatatctacctgcatactcttttaagaaatagtttatatggtttctcttcttttgattctttttaccagctagagttcttaaactttctgcatcataaatatagtcaaataaatctctttcttctatatactcaaatctacctggatatttttcttttaaaaactctactacttcagtagtaatacctcttaagtatatttttttattatttttagaaaaatattcaaggacaaaatctacaacttctggaagtttatcttttttagcaagtggtaatattgagaaactatctccttcgtattccccaactaaaacggcaaaatcttcacctatataatatcctgtcttataaacatgttgccacatatataaagtactaaaacagtactcacaagcttcataatctactaaatcaaaatatgggtctaactctttttttgaatttagttcaatatctttgaaaaacataaaatcctcctaccttttttattgcttaattttaaaaattttattttgtatatataaaaaactccaaatttattatggtattaatttcatttatattgtttaaaatataaaatataataagtcatatatatcttatattacccatcataaatttatataaacatgtaatgaatggagtgattttttattgagaaataaaatttttttatcaatacttattataatatcacttttaatcggctgtgacaaaaaatctctactatctatacatataattgatgttggacaaggtgatagtattttagttcaaacacccacaaataagaatatattaattgatggaggtgatgaagatagcgaaaatataattattagttatcttagacaaaaaagaataaaaactattgatattataatagcaactcatccagattcagaccacataggaagtcttgataatgttataaaaaaatttaatgtaaactccatatatatgcctgaacaatcaactgatagtgaggcttatcaaaatctaataaattcttgtacggataaaaacttatctattcagcatctctataaaaatgatgttttaaacatagataacaatataaatatatatgtattaagtccatcatatatacaagaagaatctaatttaaattctatagttttcaaattaacttttaacgataattcttttttatttatgggtgatgctgaagaagaaaatgaaaaagaaattttacattcttttaaattaaataatattaattttataaaaataggtcatcatggaagtaattcttcttcatctttagaatttataaaaaaaattagtccagatatagctgcaatatcatgtggatataaaaatcaatatggtcatccacatagggaggttattaataatctaaaacaaaaccatgtatcaatttatagaacagatagaataggagatattgttttttatagtgatggagaaattatatttacaaaatataattatgaaatagatacataatctaaaaaataaaactacaactacataaaataaggtaatataaaataattaggctaaaagtatgaatataaaattgctttatattcatgcttctagccttcaaatttgtatataaaatttataaattaaaatatttaaaacttattgtcctaatagttcatttactattacagatgcgattattaaacctcctacagatgggacaaatgatacactaccaggtgttacttttctaccattcattactttcttcttaagttctattggttgttcagtagaatatactacttttaactttttgatacctctatccctaagttctttcctcataactttagctagaggacaagtacttgttttgtgtatatctgtaacgactattttagttgggtctaatttatttcccatacccatagaacttattattttcaacccttttttttcacaagtttcaattagatgtattttggaacttaccatgtctatcgcatccacaacataatcatatctttcagttagtatttcgtcactagtatctttattataaagacttcttattttttttatattgatattaggatttatatctaatattctttcttccatgacatcaactttgtaccttcctacagttgaatgtagggctggtatttgtctatttatattggttatatctacatcatcaaaatctacaatagtaatattgcctactccagctcttgctaaagcttcaacagtaaaactaccaactcctccaactccaaatactattatatttgaattattaagtttttctatcccatcatctccaactagaaaactagttctcgttgtaaaattattttccatctttccacactcctagatttttatctaaatatataatagtattagaaaatttacattatataatacaaaacattatatattattaaaaataaattatcttaaaataaatttaaaaaggtatcttttaattaaaagataccttttgcatattggcgggaatgcgtgggaatcgaacccacctaagaggctcttaacccctcatactagttttgaagactagagggcacaccggcacccatccactcccataatgaaatccttctcaacgaaatctataatatcatatattttgactctttgcaacaatttttatagatttatctgatagtaaattataatttaaatagcttttatctatacatggttaaaatttacctgttttattacatatccaaaataaaaactggaaattatattttaagaatctataaagagtttcttctctatataatcaaaatataatttccagtaaaaatataaattatttaactattttaatatacgtatatctatagtttttcttccccagttataaaccgtttttgaatcattcatgtagatatcaattttatttccttttattgctccaccacagtcttctgcagtaaacaccatgtcaaattgaggtatataaactttagttccatatggtataaccttagggtctacagctattgttccccacttaggttttgttcctgttgcagttatactatgaccagtatatgcagttgctaccactctcatatttttaccattgttactactactgctactagatgatgatgaagccattcttcttgaactttctccccttgatgaggctacttgcatttctacctttgtccctttgcttacaaccttatttactggctcagctttaacaacctttttcacaaattccttttcaactttctttccattgtgataagtttctttatatattaattcacttttaccagactttccttcttctttaaccttagaatcaccctttaataaagagccatcttcaacaactgtaacttcaaatggaatgtctttagtttctacaactgttttttcctttacatcaattacttctattttatctccattagataactttgtattttcatctaaagttactatatcatttgcatcatagctaatgttttgagattctaaaaggtctcctacattagaactaaatgttgatatagttctttcttctccccttactactaatgttacttgtttattaagcgcagagtatcccgataatattccaactgataaaacaactgccattaccgagactttagcattactcaattttttaaaattcatataaaatttcctccctaaaattttttacactatatattttgcttcataaaattctgctttgtaagtttctttttttatttgtgttttttgtgtaactaaattgtaactattttttcaagagttgtcaacttgacaaaaaaatagaaatatgcatacatagtattttcaactatttaagcatatttctattagttacaacaatgtcattgtttattgttgttttgttatcattttgttaccttttacttttatatattttctatctgccaattaataggttcttttcctagctttttcaaaatttcatttatcttagagaagtgtttacatccaaaaaagcctttacttgctgacaatgggcttggatgaggtgcttccaaaatataatgtttacttgtatcaatcaactctacttttttacgtgcattacttccccatagtacaaaaataactgggtcttcacgctcacttaaaatagatattactctatcagtgaaaatttcccatcctttgttcttatgagaattagcttcatgcgctctaacagtaagagcagtatttaaaagtaacactccttggtctgcccaaggcattaaatatccattattaggtataaaacaacctaaatcatcttttaattctttatacatatttaatagagatggtggagttttcacttgtggttgaactgaaaaagctaaaccatgagcttgattatctccatgataagggtcttgtcctaatattaagacttttgtgtctttgtatgaagtgtgttttaaagcttcatatatattgtgcatatttgggaaaatttggcgtgttttatattcttctataagaaattttcttaagtttaagtagtaatctttttcaaattcttctttcaataattcatcccaatcgtttcctaagttaaccataattatcaccaattcctttcaattatttttattattttatttagaaattatatcttcttgattatcattcttttcatttgtatttatttttatgctcactctattaggtatacaaactatgctttgacttggcttgtttataaatccagtatgtacgcaaaccttatcagggcatgaagcatctactatctcaacccctttatcatgaatctttactatgttatacccccctctattctctattttaaattcttctttggcatttattgaaacagttttatacaatttattatctacataaatctcaatatttccagcatttttagaatttataacatttattatcccataacatgctataataacaaccaaaatgcctaaaataagaagaatgtcttttttcttcattttttgtcctcctatgaaattatgttataataaaataataacacaatttcataggaggaatataccatgaataagaaaaaaatcacatttatttttgtgatattgattttagcattaattttattttcattttttaggagttcaagccagaatactaaatatagtaaaactagctactaccttggtacagtaaacgaagttactatatttaatgtaaaagaatccaaaagtgataaaatcttaaatgaatgtgattcaattttaagatatattgacaacaaaatgagcactcatataccaggaagtgatgtttctaaaataaatgataatgctggtaaaaaatttgtcagagtttctgatgatacatttttcgtcgtaaaagaagctatacaatattccaaattatcagatggatattttgacataacaattggtccattatcaaatttatgggctattggaacagataaagctaaagttccaagtgattctgagatacaaaaacttctgcctcttattgattataagaacatcatattggatgaaaaaaataaatctataaaattaaccaaagaaaatatgaaaattgatttaggtgccatagctaaaggatatgctgctgataaaattgtagcctatttaaaatcagaggacgtaaaaaaaggtttagtaaacttaggaggaaatatatttactttagaagatggtaaaaatgataaaccttttaaaataggcattcaagaccccactagtaaaaatggtgaatccataggaaacatagaaaccacaaataaatctgttgttacttctggaatttatgaaagatttatcgaaaaagacggaaaaatatatcatcatatgttaaatccatttacagggtatccttttgaaaacaatctaagtagtgttacaataatttctgataaatctattaattgtgatgccttatccacttctacatttggacttggtcttgaaaaaggtatggatttaattaatgaaattgataatgtagatgctatattcataactaaggataagaaagtatatttaactaagggtataaaagataattttaaacttacagataaatctttttctattgaaaaattaaataaacaataagtttaaataataattatatctattatacatacaaaatacatatgaatttaaatagttatcacatgactaatgcaaatttaatttttatataaaatatggtatatacttaagtaatctaaaacaaattctacttatgtatataccatattaatagcttaaatttatataaaatactaattcaaccaaatttttataaagactttaaaaataaatccattctatttaaagcttcaattacattttccttttgagttcctaaatttattctaacatacttctcaccatcttttacaaaatgactcccatcttctaataatactcctgtatctatagccaatttatctgtaaactcacttgcacttatacctaatccacttatatccatccaagctaagtaagatgattccattttcatcaattttatcttattatatttatttacccaagtttctaaaagttcataatttgattttatatattcatttacaccacttaaccactcatgacattcattataagcggttatcaatcctattattccaaacacatttggagaagttatagaattttgctttaatttatttctaaatttatcccttatattcttatttataactattgaataagaagtctttaatccaccaagattaaagcccttatttggtgatgtcagtagaataacattttctaaaagctcttttccaatcttaagtattgaattaaatttaccataatgaatatgctctgcatgtacttcatctgcaaccaaaataacattattttctttacatatagttgctacccttgtcatttcttcaattgtccatatccttccagatggattatgtggtgtacaaaacatcattaatttaggcttattttctttaatttgaacttctaatttatcaaaatttatataatatctatcatttacaacatctaatgtattacaaattacatttacaccttgtttttttgctgatgattcaaaggggtcataaactggtgtgtttaatattatactatcacctttcttacaaaaagcttgtactacataatgaagtgttgatacagttccataagttaatgtaatccattctttttctacatttacctcatgcatatttttttgccaaccaataactgaatcataaaattcatcataacagtatgtatatccaaatacacctcttcttacagcttcaataaatttgttttctatttctgttggtattttaaaatccatatcagcaatccacattggtacaaaatcttctctaatatctccaaatttatctcttataatatttaaatcccattttctacacttttcacttactctatctggtttatcatcaaaattatacatttaaatttacctcttcttttcttattgttataaaatatttatctaatttatttttagcttacaactattaaatccttagtagatgtagtcaatctcatacatccatcttgtgttatgagtacatcatcttctattcttacgcctccaagacttggaacatatataccaggctctatagttacaatcattccttcttttaatacttcatttgattcaggagctaaggcaggatattcatgaaccataattcctacaccatgacccagattatgaccaaaattattggcatatccatatgaaccaattatgtctcttgcaactttatctatctctccagtagtcattcccggtcttaaaactcttatacactcttcattagcttttcttactatattatatatttcttctaactctttatttatagtacccatacaaatggttctggtaatatctgaacaataattattatacttagcaccaaagtcaaaagtaacaaaatctccatactctataattttttcacttgcttttccatgaggtaatgctcctctaagcccagatgcaactattgtatcgaaagattctttttgaccacctaaatcttttataattctaacaatttcattttcaacttgcttttcagtcataccaatctttataaagtctactatatgataaaatgtagcatcaactatttcacaagctttttttatatattttatttcgtcttcattttttgtttcccttaatgtagataaatcaactgattttaaggttgcacttaacttattactcatacttctatataaatcaaaagatacttcatttccctcaaatccaatttcctttatattctgctctctacaaatatcattaattatatcaaaatgagttctagttttgtccattaatactacattaaacaaactagattttcttttaatttcttcaaaatatctaaaatctactattatatattgtgattctttcgttataaaaacataacctgaagagctaaataaatttccaacataaaacttgtttgtaggactatttataagaaatccatctatatcatattctctaaaatactctcttactttttctatcttatccatatcttatctccaccgcctttaattaatcatataggtaaggctggtaatattgattaaaaccatattaccagccaaagttatttatagatagtaaaaattaaatactagtcgatataatctacaacaagtttaccatcttttattaatttatttctatagaatatatttcctactgctatgaatatagcaccaactgctatacctattatatatccaaataagttatctactagaggccatgcccatatagctgactctgggaaccattgaattgctcctagaattatacctgtaatagctcctattacacttccaactatgtttaaaggtataacaaaacctggtctctcaagtgcaaatggtattgctccttcagatatacccataaatgataagaatatagaagtttttcctgcttgatagaattgtctatcatatactcttcttcctactaatcttttatctaataatgttgttaatcctaatccaattggaggaacaactatagctattgttcttgctgttattggaagtacattctctgtagttaaaccaagtgcaacgaatcctgctgctttatttattggtcctcctaagtcgaatgctgtagctgctgccaaagctgttgcatatacatattctccagctgctcctgctgctgttaagaagtttttcatactttcattaattaatccaccaaatggagttattataaatatcatcaataccatacaagctaatgacgctattaatggtattaaaaatgttgttttaaaagctaaccagttatgagaaacttttatagatttatttaaccattttacaaaatatcctattatgaatgctattagtattgcacctaaaaatcctgatgcaactggaacaacttcagtccattgtccatcaatgaattgtggtacacctacaggtttattagctatatatccacctataaatcctgcaattaaagctgtttttccacctatagagtttgcacaaaatgctgcaaacagtggtatcgcaaatccaaacaaagtaaatccgaaatttgacattaattgtgctatatttaaaagactaagcttgaaccctgtaaattctcctgagttcatagcatcaactatacctacagatgggtcaagtcctaatatagcatatggtattaattgagataaggcccctataagtccacccattactaaaactggtatcatatatgatatacctgtcattatatgtttacttatttctttccattttccatttccctttgattgagttggactagatggagtagattttcctacattatttcctcctgttgtagaagcacctgaactgtttataacttttttcttaattgccattctatttcctccacaataaatttattatattcctaaatcttcttctatttcttttataacaccttctgcattttttatagcttcttgtaattcaacttcataaacttcacaaccatcaaatctttccataccttctggtgttattgctactgcatgtattatcatagttgctcctaatatatcatctcttgttaactcattttgtacaccatcagcaccttgagtttcaacttttgcttcataacctaatgcctttgctgcttgctctattgcttctgctgccatgaaagtgtgagctagtcccattgggcaagcacataatgctactaattttttattcatttcaaattcctcctatttttagttaattatttttttattttataaccttagtatttaattataaacctaaagcttcatttattaagttagatatttcttcaacattatcactttttaaaagagaatctttaaattctttatttattaattttcttgaaagagatgataataatttaagatgaatattctctttactttttcctggcataagtaagcttattgctaatttaaccttatcctcaccttcattccaaacaacatcttcattaaacttcaatactactactgctggattttcaattgcatcatttttagtgtgaggtattgctatagattctcctaaatttgtagtaaattgttcttctctagccattaaaccttcatatactaagctctcatcttctgccaaatttaagtctttagctttttttgatataaattttaaaacttcaacctttgacttagcatcaacatttaaaaatacatattctttgttaaatatgtttgttcccattattaatttcctccttaattacctatcagtgccattaatttattaaagtcacatattttaataattcctcttactcctccttcatcttttataaaattataaaggtatttaaatatcgagaaattatgcttttctttagtattaaaaaataccataaatactagctgaacctcttgcttatcccaaattattggattttcaagtattccaactcctattatagattttttatctcccttcactattgtgtgaggtattgctactagatttcctatttcagttgatgaaatattttctctatctattatactttttatagaactttcctctataaaatctctttcttttagtttatttgaaagtgaaattatgacctcttctttagtactagcctttatactgaaaaaagctttttcatcaaacatgttacttattatctttcttctttcttccttttcataaaaggctttgtttacgttttcaattaagctatcatcaaatatattttctatatataagacaggtttttcatatccttttaattcaacggtagatactatcaaatcaacatcttgacttatagccatatcaagatatctaactggataaacacctacaacacttaaatcacttatattctgttttagcttttcagaaataagttgtcctgttcctatcccataatgacaaactatacaaattttcttactagtattttttttcattctttcatttgaagcagcaaagtggatagctatatatccaagctcatcttcatcaagttttaaattaaactcagtttctagtttatttgataaaaacacggctaaattaaaagctataggaaacttctcttttatttgatgaagtaaaggattatttgattttacattagctctagctctatttaaaaatctctttatatggtcagagattgcaaccataaactcatcatcttttgtataatcactacctgaaataaggaatatatcttgaagtgcactacttataacactacttattcgttcctcaatttcacttgtgttttttcttccttgtgtacctttataagctattacaccagaataatttgaaatataaattacttcatcttcaataagtttaaatccaattttatcagatatttctttcattagattttctataaagtagtagttatgaaatctataacttgtatccattaagtttatattgttactatgacctctcttactcctaaatacagaaacaattatttttgaaagcaaaagattaaaatctttatctgaaattattgtatctttttctcttaagtgcttttctaaaatactttctatacagtatatatcgttttcactaatgtcatctaaaaacaccttcactttacttttttcatctaattttattgcatagtcagtaattaattgccttatattaatttcttcaccatgtatatagcttccatagtaaggtttagattttataactaagtcatacttttcaagttttcttttaagcttactagacaatttatttatagcggctatacttagatttaattcttctgccattgcttctatactcatataatttctattaataagcatacatattatatttgacattcttgactcttcagagtcatctaaaaaaccatcaatatatttatttgcttctttaacagctctggctatattgtttttagaaccgcttaacttgtatcctatacctctagaagaagctattaccaaatcatatttgcttaaaacactatttaaatctgctatatatcttttaatagttttagtagacacatccaatttgatagctaattcgtttgatgtcatatatccatctttattgcttaaactctttactattattgcatgtttcttagttatcattgtatcaccttctctttgatttcaattatatatcaagtaaaattttaattgtatatataatatgtctatataagggacattttgtatttatattttattacataatgtaattattgcctctgcatatatacctattgcagttataaatctatctaagctagcaaattcattcgcactatggacattgccaaagctaccatcaggaaattcacaaccaaatattactgaattattcatttcagaagcataacttcctgcactagttactctaacatcatttttcaaatctccagaatactttatatatatatcatgcaaacttcttacaagttttgaatttctatctatataatttgcttgctttaaattttccccaataagctcaaatttattaatattattttgctccatatacaaattaaatttttttattatatcttcaatggttaatatttctggatatctaacgcttaaaactacttctaattttccatctactatatttattattgttggcactattgataaaatcccacatttcccctcaatatttaaaccaaataagtttccatttatattatcttgatttatcaacttatataaatcttttgtccatttttcatcaatattttctgacaaaagtttaattgtagctaatataggatttattgatttttcgggtttagatgaatgaccaccttttccatacacaatataattgccattatcataatttatcgatatattgttaatatcaaaacatatattatctttacccaatttttctacattctttatataaactttatctggtattgtattaaactctattccaccacttatatataaagatttatcgtctatatttgaaattaactttattattgctccacctttttctccatttaatacaggaaatttagcatctggagtaaatccacatacaccatatggctctttgctataataatgctttatacatttaaatccactctcttcatttcctccagctattaatctaacctttctttttaaattaatatctaaatcctttatcatttttagtgctaaaaaattcactatcataggtcctttattatcagatacacctctagcaactaatttatcacctataatatttagtttaaatggttcactatcccatccttcacctggatttacaacatcacaatgtccaaatatatctacatattctttaccatttccatattcaatttgaacagcatgattatctatattttttactttgaaattgttttctctacctagattttcaaaccagtttaatgcatcatatactccttttccaaaaggcatatctttagatacagtttttctatcataaaatgaaggtatactaacccattgctccaataattttaaaaattctttttcatattttttgctttctgccttaaacaactccataattatcactccaatttagaactttatattatatatcatagtttatcttatttaataactccttatactttatgtcatttcaagggacaaaacttttttactattgattttataatctatttatatataattatttgtaggataaatttaatatcataggaggaacaggattatggaaccattatttttaaaacctatttttatggatagaatatggggtggtactgcacttaaagataaatttaattatgaaatagattcgccaacaactggtgaatgttgggctataagctctcataaaaatggagattgcttaatagaaaatggaaaatataaaggtaaaaaactatctgaattgtggaataaaaatagagaattatttggaaacacacctggtgataagtttcctttacttacaaaaatattggatgcaaatgataatttatcagttcaagtccatccaaatgatgaatatgctaagaaaaatgaaaatggagagttaggtaagacagagtgttggtatgtaatagattgttctgatgatgcagaaattataataggtcataatgcaaaatctcataaagaatttgtaaatatggtaaataataatgaatgggacaaactacttagaaaggttaatataaaaaagggagactttttctatgttccaagtggtactatacatgctatatgcaaaggaacattgattttagaaactcaacaaaactcagatactacttatagagtctatgattatgatagaactgacaattcaggtaataagcgtgaacttcatgttcaaaaatcaatagatgttacgaatgttcctcatataaatttcgatactgactataaaatcgtatcaacatcagactttaaatgcacaacatttgtgtcaaacgaattttttagtgtttataaattagatgtttttggaaaatgtaattttacacacaatacacctttttctttatacagtgtgttggatggaaatggaaaacttatacacaattctgtagaatataatttaaaaaagggtatgcattttatactgccaaacgactttggagattttagttttgaaggtaatttagagattatatgttctcacatatagatataaaacctagctaaaaataggctatcataataatttaccttatgatagcctatttcttacaacttaaatatttaaacaaatagtatttttattttatttttgctcataatcatttttaatagtatatatcagaaaattctatttttattttttcttgaatattatatattctcttatcttctgtgtaatgttcactactaaatcccttcattggaagtgaaattaagaactctgtgcctttattcacttcacttactacttctatatctccaccatgaagacttactagattcttaactatagcaagccctattccacttccttcagtatttctggataaagtcttatcaacttgtgaaaattcttcaaaaatcaattctaatttatcttgtggtattccaactccagtgtcttttacacttatgattactttatctattttataatgaatacttacatatatccagcctccattatcagtaaacttaatacagtttgacaatagattcaacataattctctcaatttcaaccttgtctatataaacattaatttcttcaaggtctgtatcaaaaagaatttttatgtcttttctaagtgcatactcttctatattcataaataagtcttctattacagatacaatattgtatttcgcaagttttagtgtatagaacccagactccatctttgttaaatctataatgttatttattaatctttgaagcctataagaactttgtctaactaaatccacatgagatttaatattgttattgtaatcttttatcttttcatttctatagaaagaatctaccagttgatttgaactagatataacatttagtggagtttttaattcatgagacatatttgcaaaaaactccgttttgattttatctgttttaaatctttcaagcagttctttttctgcttgctcggaatatttcttatgtactaaatcttttataataagcattatgtatctagtattgtatatagcaaaaggtaatgcacttaattctacttctactatatcatcataactatttatcaattcatattccagtaaaagtatacttctattttcatttaaaactttagccatattatccgtaaatttcattttttcttcagtattcgcattcattaatagtttaatattagaatcttttatatcatctatgtttgtaaaagctagcatatctaaaaacgacttatttgcatagtttatacttaaatcttcttttaataagcatatgccatcaggtaatatatctataaatcttgaatatgatgattgactttcctcaagttttatttgagatatttttcgagaggttgtatcacgtattacaataatagttttattagtaccagcattagtatactgagaaaaactcatctctacatactttacttcaccatctattacatatcttttttctatactttcttcacttttacatactaatgaaaaatcaatactctctaaattatttttaaaaatttccctacatgcattattaacatatattttgttattaccttcaagcactactatgccatctccaatactttctaaaaaatctttacttctcttatttgcttcaataagtttgcgttcgtactcctttttcttagtcttatcttctagtacacacaatactccttctgtttgtgaagcaataattaaaggtgcaaatatagcttgataaactttattatcgcttgtactaataagtttctctgcattcttctcatgaacaaacacataatgaatgctttctatcaaatcattgaagttttttattttatcagtcaatttatcttgttctttatagtctccaaaagtatttctaaagctcttatttgcatatgtaatttctccatctttgctaaacactactatgctatttactgctacatctaatgtagattgtagcctagattctcttttcataagtattcccttaagttcctctatcttttctgtctcatagattaattttttattcttttcttttaaactttccgttttttttgttaattcttcattcgtatcatgcaattccagtgctgttttcttaatattcttagatactatgtaattatataaataatataaggctacatttattattatctgtgataatatccgctctacatttctattatcaataactatatgcaatagatttggaactcttgataaaattattattactattattctgttaaaaatctttttttcatcatattcccatttacctttatttgaacttgaatttaattcaattccactaatgatagaaataattattatgaatatagatattataactcctaaagcatattgtgatttaccatttcccagatagtcacaaattcctgatattatgaataaagatgttattgttaatgtagcagttgctataaataaaattatacttgaataaatttgtttgttatccttaacaaatttaaaacttaagtatacacccagtataggaaataaatctgttattgctgatattgtgatgttaatctccattatagacttagttttaatccccaaggaattaaataaatatatacactccaatactccagtagctataaaaattaatcctaaaaatgtagaaaatgaatctactttaaattttgtagtattaaatataattactcctgtagctactaaaaatatcgtatatatggcatgtaataaagtttcatatttctctatatcttttataataaataataaaagtactgagcccattattataaataaaaggctcatgtcttctctttcttttatatctggttttacatcaggtattatattcttcaatactttacacttcctcttaattaatattttatactaattaattatacgatactcgacattataattccttctttataccttaaagcaaaaacagacattttctgctaaaacaaaattcttttgttttctactcttttagttattttgtttctatcgaagttttccaatataatcatgcaattctttctgctagaatcaatcaaatctctgtattctcctaatgttatttctttattttcttttatataatttatcaaaatgttctttgcattttcataaatatctttgtccattatatacaaatcatctaatttctctactttattacctatcattgactccaatacttcagcatagttatgatttccttcagaaacttcatctattgtcagtatagaagaaactccacatgattttaatcttttttctattttttttgctatttctttttgcttatcatttaaaataacctcaaaatctaatagagatactatattattttctatttttatagcattttctgtagacaatttttctaataaaatatccatctccctagtcttaaaattactctctatcttagaccttacttcttcttttagtatcccttttctaagcctatacttcttatggtactcacttaaaagctttattgtattttcttttaatttattgtattgatttatatgcatatacatatttcctataataaatactttatcttctgatataagtgcttcaagcgctctttttacatcttcttcatgagcaccactatagctcattatttcttttatatttggataattttttaaattcctttttaagtactcttctattatatcttttagttcgcctttttcttttatttttaatgcttctataactttttcatcaaatttcttatgttttttaggagatgggtcaattattacacctccacctatagtttccattggagaataacgtctcactacaaacgtatcacctttcttagatactatgctttcttcaagtctcaactgaacatagccactttctccactttcaattaattctttatctagtggaactgctctacaaagtatctctctagttccatgatacaatcttaatctatcccagtgctttaatcctttatctaaatgatttaccaatgataattttacatctaacatcattgattcctctaatgagtttggtgcagctaaaacatctcctctttttatatcatccacttttacatttgatatattgattgctgttctttgacctgcataagctgtatctttattttctccatgaacttgtatacttcttatttttgtttttaatacctgtggatatataactaaatcatcttctatacttatctttccttctattaaagtgcctgttattacagtaccaaacccttttattgaaaatactctgtctatattaagtcttgctggagagttttcatttttatcttctatatcatcactcattttatctattttttcaataagagtgtctatacctcttttagatatagaatcaacttcaattatttcagcatcttcaagaaaagttccttttattttttcacaaatatcttcttttactagctctctaaattcatcatctacagtatcagacttagttagaaccactattccatttttgatatttaaaaagcttagaatatctaaatgctcaactgtctgtggcataaccccttcatctgctgctacaacaagtaaaactatatcaattcctgatgctccagctaacatgttttttatgaatttttcgtgtcctgggacatcaacaattccagctcttctattgtttggtaaatcaaaataagtaaatcctaagtttattgaaatacctctctttttttcttcatctaatgtatcagtctctcttccagtcaatgcttttataagagtagtttttccgtggtcaatatgacctgctgttccaattactacatttttcattttttgccccctctaaacctgctatgactaaagtcacaagtatgtgtagctattttttaatcaaaacttcatacttatacttctaaatttaatatttattagctcaaatttatttaattaaatgcttttctcaattccgcaactattacatcaaattcatcatcaaatatagttcttacatctagtacatatttattatcatacactctggctattatatgtgcttcactaagtcttagttttttttctaaagatgaaacattcatatgttcaggagttattgatattacctttgtacttatagtttcaagaggcatagaccctcctcccacttgtgaaaatccatcttctatatttatgtttgcatttaagtttaaagcagttattttttcaaatagtttatttgcttttacttctaattcttcaattttatatgtcaacatttttaaagtaggtatattttctatagcttttgtctcatctaaatacattctcaatgttgcttcaagagcacatattgtaagcttatcaactctaagtgctctagtaagttgatttttcttcattttttctatatactcttttttcccaactataatacctgcttgtggacctccaagcatcttatctccactaaaagttactacatctgcaccttgtcgaatagaatccaatacagttggttcataagataaaccgtattttgataaatctataaaaactccacttcctaagtcttctattacaggtagtttatattttttacctaaattaaccaattcttctatagaaacactctctgtgaatcccattattctataattacttgtatgaaccttcatcaatacatttgtatcttctgtaatggcctccttgtaatctttcaaatgagttttattagttgaaccaacttcaactaattctgcaccactaagagccattatacttggaatcctaaatgaaccacctacttcaactaattctccacgagatacaattgcttctcctcctttagccattgtgctaagtacaagaagtactgccgctgcattattatttacaactagtacatcttctgctccagtaagtctttttattgtactagttaaatgagagtatcttgaacctctttctccattatccaaatcgtattctaagtttgaataccttgaagcagcacaccataattcatcttttatatcttcactaagtaaagacctccctaaatttgtatgaataactgtaccagttgcatttataactttttttaaagataatgagtaatttaacttaactctctctattgcagattctattatttcaccaaactctattgttacagagtttgatgcatcttcttttaatcttaatataaattgtctttttaaatctattacttctctcacagattctaaaactaaacttctaggatattcatttattatttctacaattctattatcacttaatacttcatcaactgaaggcaacattgcaaacaattctcttttgctcaaaacaatcactctttctctataatattttataaaactgtaatatatttttccccttttggaactacagaacctataattttagcttctattgctccatttaatttcatatcttttacaagttcctctgcaagttcttcttttactgaaattaacaaccctcctgatgtttgtgggtcgtataaaatatcttgaactgcaacttctatatttcctacaacttctacatctttagatacataatgcatatttttatacataccagcaggtataattcccatttgtgccatttctattgcaccttcaataattggtacatgttttgattcaatttcaatacttacttcagaagctttggccatttctaaagtatgaccaagtagaccaaaaccagttatatctgtaaccgaatttacatcaaatttctcaaaactcattgctgcatatttatttaaatgtatcattatttctattactttatctgctatatgttgttctaccataccttctttcatggctgtatttaatacacccactccaattggttttgttataattaacttatcaccaggttttgcagtagcatttgataaaactttatttggacttacaatcccagaaactgaaagaccatatttaggctctttgtcatctacagtatgccctccaaccaaaagtgctccactttctttcactttatcaaacccaccttttaatatttccgcaagtacatccatatcatggcatgatggaaaacaaacaatattcatagcaaccaaaggtttgcctcccatagcatatacatctgatagtgaatttgatgcagcaatttgaccaaatacgtatgggttatctaccattggtgtaaagaagtctaaagtttggataagtgccatatcatcatttaatttataaactgcagcatcatctgctgtatctagtcctactaataaattttctatattatcatttttaggcaattgagataaaactgatgccagaacctctggccctattttagcggctcaaccacctgctgttgtcatctctgtaagttttttttgttcttttttcataaaagtgcctcctttactaaatttccacatgtacacacatatacatacatatttataataacatatctatatgtaagttttgtattatattttagtctacacaaattaaatcttttatattttcatactttttatctccaataccatttacattttttatttcctcaattgaactaaactgtccattttcttctctgtgttgtaaaattttattggctgtagcttctccaaccccaggtagagaatctaactcttctatagtcgctacatttatatttacttttgattcgttagatatatttttattggatttatttttaggctcacctcttgactcattcttctgatttggtttattggaatcatcattacttgtaacagatgttgcttcacctattttaggtattatgtaatgttgttcatcttctaatcttactgatagattgactccatttaaatctgcttcttttgtcgttcctcctagtaattctacagcatcataaagtctcttgtctgactctatagttacaattccaggtctatttactgctccacttatgtatatagttattttattattttgaaaatttttatctatgtctttagttactttattgtgattattatcttcacctttaatttcattctctacaacatgtgttttttcattaggtaaattttttttacttacaacataaatatcatctttgaaaataagcgatttataaacgattattgatgatattattaaaataaataaaacaaaaaacgaaataaattttaccttttttttcatatattaatcactcctttcttttaattattgacaaatatatgctatactaaaagatgaatttaaaatttggaggctcacaatgaaaagaaatttatcacttttattaatctgtttattgatatttacttcatttttaggaagctctaatatctcttttgcagataatgaaccagctatagttgctaaacatgcagttttaatggactatgagtctggcaaaatactatataataaggatggaaattctaagctttatccagcttcaacaactaaagtatggacagcttgtttagttctaaaggaggttaaagatttaaatcaagtaatagaaattaaagatttacctcaaatagatggctctagtatgtatctaaaaaatggggaatcttttactgtaaagcagttactagatgctcttttggttcattctgctaatgatgctgcttttgtattggctagatatgttggtggtggcaatgtacaaaaatttattgacctcatgaactctgaggcaaaaaaaattggagctactaatactcattttaataatcctcatggattaccagacccaaatcactacacaacagctcatgatatggctctcatagctagagaagctatgaataatgatacttttagacaaattgtaaaaactaagtcacttaaatttgaagctacaaaagcatatccttatgagagatactttgtaaacactaataagtttttgacatcacatgataagattacatacaaaggtcaacctataaatataaaatatgatatagttgatggtataaaaactggatatactgatgctgctggtaaatgtcttttatcgagtgctgtaaaagatggcagaagagttatcgttgctgtatttaattcaactaatgctgatttatatttagactcacgtattctgattgattatggatttgataactttaagtgtgctactattgttgataaagaaaaatacacagatactaaaaaagtattgtttacaaaacaacatgaattgatttatgaaccaaaaaatagttataggatattcttagaaaaagatgaatctcaaggcaattatgataccaaaacagagttaaataaaattgatttgcctataaaaaaaggagctaaggttggtactttaaatgtatataataatggtaaactagaaaacagtatagacttaattgcaaaaaataatcttgatagcagtcttccattttttactggaaataatattttaatgacttttgttaagattattgcaggtattctagtgcttttagttttatttataatagcttcaaatataaagaagaaaaaaagaaaaaaagctagaagtaaaaaaaatatgaaaaagtaacaagtagttggaaattataataaaaaatttataatatacttatccttataaatctaaaagtactgagataataattataactattatctcagtacttttaattttatgtttatgtattttttatacctatatatttttttgtttttgtttgtctttaagcttacattttgaacaatttcccagacattcatcaaccatatctagacattcattaaatgctaccttactactatttttatgccttacgattaatatatcttgttttttagcttgagactcaaccgttctagacatcttatgtgaaacagttgatgtaagtatgacaactgcatctggtcttcctatagaattatttaatttagatgacatggtagtatatacctttgtcttataaccttttttcttggccataaccatataatctttttccattctttcatgaccaccaatcactaataagttcattagatttcctcccatttatttgatattgattttcattattatttatattatatataatagtatttagaaataattttgtcaatacttattgatattaattatcattttaataataattttttatttgtatttattttaaatactactccttttaagtttcttacttttatataataaaatcttacacaataaaaagctgtaaatttaaatgataacattcaaatttacagcttttaaaaataaatacattattttaaattcttttttattcccttatttaatatactctcatagtcgataaaatcataaatatcttccttaaaagcatctgaaaacttatgtaattcttctaatgttaaatcttctattgcttttttattatcttcacaatatataacgatacttcctactataccatgtgcatctctaaaagcaacattatttttaaccaaataatccgcaacttctgttgcatttaaaaaaccattttttactgcttgtttcattttatcctcatttacctttagtgtggctatcattctatccattatttgtatacacatttcaagagtatgtacactatcgaaaaaaccttctttatcttcttgcatgtctttattatatgctaatggtattcctttcattactgtaaaaagaccaaataagtttccatatactctgccagtcttacctcttataagctctgcaccatctggatttttcttctgaggcattatactacttccagttgtatataaatcatctatctcaacaaatccaaattcttgagaactccaaagtatcaactcttcacttaatctacttaagtgcatcattataattgaaaaatcactcattagctctagtaaataatctctatcacttactccatccataaaattatctactacttttttaaatcctaattgttcacaagttatacttctatctatatcatgcgtagttcctgctaaagctccacagcctaaaggtgattcatctaatatttctatagcattttttattcttttctcatctctatcaaacatactataatatgccattaagtgatgcttaaatgtcactacttgagctctttgaagatgagtatagcctggcatcatcactgggtttttgtcagcaacatcttttatagtagctttaaattcagatattaaacccaccaaatcatttgctttttctttagcatacaatctcatatcaactgcaacttggtcatttctactacgtgctgtatgaagcttcttgccaacatctccaattctttgaattaaatttatctcagtaaaactatgtatatcttcatactctccatccaatactaactttccattttctacatcttcaagtatcccttttaaaccttctgttatagactttccttcttcttctgttaaaagtccacattttacttgcatatgaacatgtgctacacttccttcgatatcttttttgtacagtacacaatcatagccaaaagatttattaaattcttccataagttgattttccgcttttctaaagcgtccgccccataatttcataactttcacctcatattttaattttttgtattttaattataagtcttgtaactcaatgaaactaaaaaatctcttggtcaaaaagaccaagagacgaaatattccgtgttaccactctagttggtaaacaatgtttacccactctattctcttaaggcgagattacctactaccatactgaatttcaagtagtattctccaaagttcttttcaatataaagtgttatcattaggctcacaccatcccccaattcgctgagattttctctatatctactctctttttcactgaatctaaatttttatgttttatctatttgtattataattactatctacaaaatagtcaacctattttttcctattatatactgttttaagagctaagtgattcttttaactctaggaatttataaattgcctttgcaactccactgtcttgatttgtatctgtaacataatcagcttcttgtttaatcaattcttctgcatttcccatagctaccccaagaccagcaaactttatcatttctatgtcattgtaattgtctccaaatgcaattatatcttctctgtctatattcattttttcagctaaaattttaactgcattacctttatcaacaccttcattcatgacttcaatattgtttggccatgaagaagttatctttattccttgaacttttctcaattcttttcttatttcatccaaaatagatggatttttttcttctatgattacaaattttagtatatcttttttaaagatttcttctctcaaatcatcttttacaattacttctgtttcagagcctaaaaatacacttaatctatcttcacgtccttctatttttttcgaaagcatagaatctatactattacattggtagtaaatatcgtatttatctaatacatctaaaatgtttaaacatgttcttgtatcaatcttatttgaatatattatatttccattttgctctcttattaatgaaccattacaagctattattggcatgtcctctttaagaaaatctacattgcatttagctgaatcgaaggctcttcctgttgctaaagttacattaataccgctttttataactttttgtagtgcagttttattttcatctgtaactttatgattattgcctaataaagttccatccatatctgttacaattaatttatatcccataatccaactccataactttttattgtatacctatatttccttaatataatctaaagaattacccttattagattatatcataactttatacttaaactatttcaatttacaaaattaataacattcatttaacttattttaagagcaaaataaatcgtttcttgtagtatttttctgaatattttcaatttatagtcttataatgctagaaattttacaatatatgatatataatcatattaaataaagtgagctattataatatttatattcattttttactattatatattttcataatattttaaatctagcaacttttataacatttattattgactaaataaggagtgataaagtatgaaactaaaaattaacaaagctattgaaatgcagttgaaaaaaagttatgcaatagaatctggacattcagaagatgtattcgagatagactgtggtgaaggtataaataccgtgtcttactcaagcaaagctgtagaagcttttaatgctttaaaatttgatatgataagaggatatcctcattcaattgctttaaaagataatatagtcgattattggaaagattttatagcattagatactgacagaatttgtttggcagatggttctatacatgttatttaccttttaaatagactatttattgaaaagggagataaagttttaggatattcacctcagttctcagaatatgagacagatataaaaatgcatggtgcaacttatgattatgttcttttaaagaaagaggataatttcaagtttaatgaaaaagaatttattgaaaaaataaatccagaatataaagtaatttacatagacaatccaaacaatcctacaggacaaattatacctttatcatcaattgaaaatatagtaaaggaagcagctaaatatgatatagcagttatggtagatgaagcttatggtgaatacatgccaaaagaaaattcagctgtcaagcttctaaataattatgataatgtaattgctttaaaaacattttcaaaaggatttggtttagcaggactaagagcaggatatgcagttcttccagaacaacttgttagccctattaaaaagatttctactccttacgaagtgtctgaaatatctcgtagtattgcagcaaatttattagatgatgttcaatttatagaagaattaaaagaaaaaacaaaagatataaaaaatcaattactaattccatggaaaaaccttaatatagctgaaactagtgatactgtatcaattatgacagttgaacataaaaacaaggacatagatttacaacaagagtttgctaaattaaaaataagagttatatctggaagtgattttactggacttgataaaaatttcataagatttagaatgcctgaagaaaaagaattacctgaagttataaaagcattccaaataatcgataatatagaataaattagactatttataaaaggcatattgttaaaatcaatatgccctttaattttttgattattttacttcacttctatttattaatttgttaagttccattaatattgatgaaattaatgctaaccctaggcaaatccccaactggtacaatccaaacgttgttggtatagagaatattcctcttagcactggtattagtgttaaagagtaaagcccaagacagactaaaactgctcctataacgtatttattgctgaaaaaacctaattttattactgtttgattattagaacgtgcaggtaatgtttgcattattctagctaatatcaatgttgaaaatgccattgctactccaagttctggagatacttgtaatcctatatattgtgcaattattgtaactacacctattatacaacctcttatagcaactgccttcaatgttcctcctgctagtatactttcatccgggtgtctaggaggtttattcattatatttttttctgacttttcaaaccctaatgcaattgctggtaaagagtcatttactaagtttataaacaaaagttgtaaagctgtaaatggatttgaccaacctgcaaacactgcaaatactatggatactatagctcctaagtttcctgcaaatagataagtaattgattttattatattactgtatactgttctaccaacttcaacagcatttactatacttgcaaagttatcatcaaccaataccatagcagaagcatcttttgctacatcagtaccacttcccataccaattcctatatctgcttgttttaatgcaggtgcatcattaacaccatcaccagtcattgctgttatattattcttatgttgccatgcttttactatacgaattttattttctggcgagactctggcatatacacttatattttctagtttttcatatagttgttcttcactcaaagcatcaagctcttttccagtaagagccaagtctccttcttccattataccaatctcttttgcaattgctgctgctgttgttttatggtcaccagttatcataacagtttttataccagcactctttgcctcttttactgcatccattacttcttctcttggtgggtctatcattgccattattccaaccaatgtcatgtcatgttcgtcatcaattgaaggtataaaatcttcttctgggacatcttttattgcaaaagctaatactctaagtgctctatttgaaaactcttcatttttatgtttatattcttctattatctcatctgttatatctacttttgaaccatttttcaaagcatatttacatctactaaacacaatatctggagcaccttttgtaaacattatataatctccatatatactatttacagtagacataagctttctgtctgaatcaaatggtatttcatttattctgatatacttacttcttaatttatcataatctaaatcatttttacttgaataatttattaaagccacttctgttgggtcaccaacttctttaccatcactagttatatgagagtcattacacaatgtagaaaccatagtcaataatttagcatgataagaatagtttactttttctttatctaactcatcattattagttccatacatataataatcaactactgtcattttattttgtgtaagagtacctgttttatcagtacatattacacttgttgaacctaaagtttctactgctggtaattttcttattatggcttgtttttttgccatactatttgttccaacagccaatactatagtgactattgatgatagagcttctggtatagctgctactgctactgctacagagaacatgaatgaatctaaaataatttgtgtcatttctccatttccagccataaagtaatttcttgctacttgaattataaatattaaaagagcaagtattacaatacctacaccaagttttttactaaaatcctctattttttgttgcaatggtgtaagtttattttcagcactttctaaaagcccagctattttacccatctcagtatccatacctgttccagtcactacaaaagaacctctaccataaacaactacagcaccactaaataccatatttttctggtcacctaaacttacatcttcacttattttttctgtatgctttaaaactggttctgattctccagttaacatcccttctacaaccttgagagattgtgcttctataagccttccatctgctggtatgtaatcgccagcttctaagaatacaatatctccaactactagattttttgctggaattgtcatttttttattgtctcttattacctttgcgtttggtgcagataaatttttcaaactttctaatgaactttctgctttttttgtttgtacaacacccagaacagagtttataataataactgcaaaaattattatagactccactgtttcacctaaaaatatttgtactaaagcagctatcaatagaattattactaatgggtctttaaaactttctaggaaaagcttataagtaggaaccttatctgcttcttttaattcattagctccatttttttccaacaactcttctgctctttctttactcaaaccagataaacttgagtctaaatttttaattacttcttgataagtacttttgtaagacatttgttgccctcctcttcaataaatttattttatgtttgggggctcttatgtatacttgaaatttaaatttttttaaataaaaattccttgaataaaaaaagaccccaaaacaaacatacctaatgcttattttgaaggtcttgctatcaaggaatcccttgctaattaaccgagtatttctactgtcttgacgattaattaccactttcgtgtaagctactccccttcgagtagttatcttaaattgtatttacattatatcactttacacagctaatagtctaggttattttttattttaacctaattttaacaaaccatctcttaatttatatgtaaatattcttctaaagtcaaattattcattgcaaagtttttgctatgttcagttccaacatatctatagtgccaagattcatacatatatcctgttatattctctttaccttctggatatctaagtataaaaccatatttatatgcattttcatacaaccacttagcttcttttgtattgttgaactttttatttgcccaacaagactggtcatctcctccaatatcaaaagcaagtccagtttgatgctcactctctccaggtttagctgaaaatctatttgcttctttttctccatgttcttttacatatgatttaaataatctatcttgatattcataacttctatatgtactaaaagcttttaaatttaatcctgacttttgagcatctttattcattttataaaaagcatctctcgcttcactgctttcctgaggagaataatctttgggcaaactatattttttattcgctactataatattgtttattgataatacatttacgcctttcctgtatttacttaattcagctgtcataattttacttccttcgctagagctatcaataaacatttctacaaaaactataaatagagcaaaaattattgctacacaaattttctttttcatatactacacctccataattggaatttgatacagaaaaatttcaagacattctctttcatactataatcataccactaatttattgcaacttctttaaacaattcttaagaaactcttaagtttcttttttatacgactaaaaataacaacaaatttttcaaaaatttcatattacagtctatatattgattttttttccaaatgatgtataatatatttattaaaacttgtaggtactatatagtactaaacgtttttgcgtgaaaggagataataaagtgacagaaaaacaaaggctcattataaatattgcacaaaaaatttttgaccaaaaaggttttcaaaatacttcaatatcggatgttgtaaaagagtgtaaaatgtctaaagctactttttacaagcattttgaaactaaggaaagttttatctgcgaaataatcaattattatgatgaaaagtttttagaaattatacattccataaacgaaaataatgacattccatcatcagaaaagttaaacagaaagataattgctgtatggaaaaatattttttctagaactaccataaatacctatataagagaaaatttttctgaagagcaacgtaaggctacaagtaaattgcaaacaaaatcacgagctaacttattgaatgaatacaaattaagcttatttgataactatggtgataaaatagaaaaaattatatttgatttagttttcttattggatgctctaattcatcagtttatatacattattcatgtacaaaaaagagaaataaatgtatactttattgccaaatttactatacaaattctagatttagttgtagaaaatatggataatctaaatcctttaattgaaaaatcaatgtttttacataaacaagaagatgaagtttacttttcccttcataataaatcgctattttttaaaacgatacaagatatagaagaactaatcaaaactgatacttctctccttgaaaatcctaaattactagaagcaataaaaaaattatacgtcgagggaaaaaatcaacaatatgattctttaattatggatgcaatgattgcatatttagaaaaagaagacactttaagaccaaaagtacttttattgaacagcattaaaaatcaattaaaaaaggagacgttataaattatggaaacccaaagtaacaataaaaaaggaaatttaataatagcaattgtaatgactggtgcttttataagttctctcagtcaaacactattgtcaacagcattacctaatataatgtcagattttaaaattactgctgatattggtcagtggttaacaacaatttatctacttattgcaggtattattgtacccacaacagcttatttaataaatcgatttagtactagaaagttatttattacatcaatgtctatcttttctataggatgtattattgcacttttttctaataatttttcaactatgttgattgctcgtgtgttgcaggcaatgggttctggttctctaatgccacttttacaagttattatactctatttatgccctgaggaaaaacgtggtgcagctatgagtttagttggtattacagtaggatttgctccagcaataggtccaactttatcaggatggttagtagattcatttggttggcatagtttatttctgtttctttcccctattgctatattagatgttatactatcatttattctattaagaaatgttggggaaactcaaaaactaaagttagatataccttcaatagtactatcatctctaggttttggtggtttattaattggatttactaatcaaggtaattatgggtggactaatattgccacatatttaccaatattaataggaattatgtcattaattttatttacattgcgtcaattaaaatctaaagaaccttttttagaattgagggtttttaaaaataaaccatttcttatttctacaatattaattatgattgtatatgcctcaatgatgtctgctacattaatgattcctctgtacgttcaatctgtaagaggattttctgcattatcttcaggttcattaatgttacctggtgctatattgatggttgtactcaatccaattgcaggacgtcatttagataaatatggacctcatgctctatcaatattaggaacaggatgtttgtttttaggaactttatccttcgcttttttaggcagagatacatctttaattcatgtgtcattgatgtattgtattcgtatgattggtatttcaatggttttaatgccattaactacatggggaattaaaacattagatagagaacttatatctcatgccacagcaattaataacacactccgtcagatatctggagctataggttctgctatacttattactataatgacaagtgctactaagaaagctcatatgagttcaaacatgctgtctaacattcatggaatagatgttgcattttcaatagcagctactcttgcatttactggtttaattgtatctatatgttttataaaaagacatcaaattattagaagttaatacagaaaaggagttatcctatgaacaatttaagtttgctctatgataactcctttttattcattttaaccagtacagttttaattattctatatatttcctatatagttacctcttaaacactcattcgtttttatcaatataattgtttctagccttacatacattttttgtcattatttttctgataagatgtacatatatgaaattttttaattttgacatatgttgtgaatgagtagaaaaaaatacatctggtgatggaaaaataccataatcatacacgatagcttctttttggataaaagtatctttaccatcccaatcaatagatgtatttttcaaatcatttgtagctattgcatactttttaaacgttccaccatgattaaaaaacttcttctgaattgcttctaaatattttttatcagttatgacaccctccagagcaatccacctatcttgataaaatacctctacccaagtatgaagaatatattttggtgctaatagtgaaatcaatttggatgtagcacctcgttgaaaatcttttgttacatcaaaagcatgaagcctacaagggatattcactgcacgtaataatgccattaaaagagtagcttttgtattgcattgtcccataccatcatttaatacctgtgttgcgcttaacatatcagaagcattatatccaaataaaatatcattctgtacaaactcataaatagattttattttatgaaaatcatctaattccaaccaattctttgatgataccaaaagcttaagttgtggttcattataatttaacatttttgtttcctctaaatattctttattcataacaaagcccctttcttagtacaacttcattatataacgagaatatttaatatactttcaaaaattcgctatctttcaaagataaagaaacaggcattcccatcattcgcttaactgtccctgcaaagtgtgatggagtatcgaatccagcagtcatagaagcttcggtaacatttttcccagaaagtaattctctaaaagcacactccatttgatgaaataagatatagctttttaaaggtatccctatttgttctttaaacagatgtgataatctacttgctgatagggacactttatctgcaaaacttgaaatagtatgattatcacaattacaagtacgtaataaattgagcaattcagtaattctgtcatcataatgtttgagagttataggtatattcaaatagttattaagcatttccataaatcttaaatattgttctttactagagttatatatcaaaaaagttccttgttgacgtaatttctctaatccatcattgtcacatatccagtagccaaaatcattcatttttgaggtaagctgttctgcatatatagatgtaggttcaataatagcagagtaataaactttttttcttgctgaaaatgaatgagagatatttttatctactatgatacaattacatttaactaatttttcattgactgttatttcaatgctgtcttctatccctaagaacagttgtaacatgcagtggctatgtgtatctgcctctaaattatttgtaatcatgccaatcctatcttcttgccaaaaaattttatttataatgttcattgcatcaccccattcttctaaaaatatcactctttattttaatatattgccatatgtttgtgaatacattttgataaaagactctgaaaacatatctaattattaaataaaaaccctttcttttatcctactatcttaattctggccagtattccttattaacttctatcatttcatccaaaatttctttagcaacattcatacttggaatagttttatttaatgtgaatgcttgtaaagctttttcataactattttctatataagcttctactatcaatttttcactgttaagttgttgcatcattaatccttgttggaatagaggtattggacctcgagcaataacttctggaccatctttaccaatatatgctggaatttctaccattgcatcatatggcatgtttggtatagctccacgattttcagttataactaaaaaacgactacgtgtatcatttttaattgaaactgccaaatcactaatccaatctccatgtgaacctgcataaaatactttttcagaaatttctccagtttctaagtaatgtctcacaccttcaaataagtctttttcacggctttccataacctcatttgcacgagtacgatttatgtttgaatgttccactgtttctttacttaaaagatagtatgttaaataagtgtttggcagatattttgggaagctttctaacattgtataaacagattcccaaacatgtatccagctacttacagcatggcgatttcctgtactacgacttttatttaagttttctatataagattttggtaataatattttattttcttttatgtattccttaatctcttccattaagtctctatgtttataatctattgaagtaaaccagccaaaatgatttagaccaaaataatcatagcgtatattatgaacgtcattgatatttaatgactccgctatcatatctataatagctattggcatatcacagatatttataatccttgcatttggtcttaacttacgacaagcttcagaaacgattgcagcaggattagagtaatttaatatccaataatcttttttagcatatttctctacatcatcaataacctttatcattggttgtattgtacgcagtccgtatgccatccctccacaaccacaagtttcttgacctacacaaccatatttcaatggaattttttcatcctgctcacgcatttcatatttaccaacacgcatttgtgcaaatataaatgtagcatctgtatacgcttctttttcacaattagttacagttagtttaacatctgttttaacatcttcttttagtatccagttgacaactacagctactttatcttggcgttctttatcaatgtcaaataagcgaatttcctcaagctctaactctttttctcttaacgcaattgacttaacaatacctggagtaaatgtgcttcctccaccaacaatagtaataatcataataattattcctcctctataaattatatgtatctttaataaatagtaaacagcacttaaagctgttatttacccttgctatataaatatatatctttaataagcttctaaaaaatcttctactgcacgtcttacctcatgcacatgaagtccaaaaattatttgtatatcttttcctttccttacaatcccgctatttggcgttaaattaattatatcttcattaatcttactttcatcttttacattaacacgtaatctagtgatgcaattttctactgtattaatattttcttttccgcctaacccatcaattatattttctatacctgcatctaaattaagttgttttgattgttcttcgcctgtagctgtactctcatcttcacgacctggagttttataattaaatttcttaattaaaaaactaaatactacaaaatatacaataatttgtgcaagtcctaatatcatcattactggccagtgtgttttttctacacctactgtagtattcattataattgatactaataagttccctccacataatgcagtaacatcaaatatttttaataaagctataaaaagaccagctataactgcatgtacaaagaataaaagtggtgcacagaatacaaacataaagtctaatggttctgttacagaggctaatactgccgtaattattagtggaataatcgttgccttaactttcttcttattttgcttatatgcagtataaataaaggcagctcctatacctatataaccaaacatctttgtaaatccagttgccatgtagtatatactatctgagaaacgctcaactggtaaattcatttctgtcataactatagcataggctcctgaaactgtatctgcaccaactttaagcactcctcctaaatcagaaaactgaaatggtgtatagattaaatgatgaagtccagttggtactaatattctctctaaaaaaccatataagaataaaccaaatgtacctgtatctttgatgacatttgcaagagaagctattccttgttgagctaatggccatataaagttactcacaactccaattaaaatggatacaaagaacatgcatataaaactaaaatttgctcccgagtatatctgtaaagctcctttaaatgttttgttgcttgtacgattaaatacatatccagctatacaccctaaaataattccaccaaatacacttgtatctacaacttgaatacctaaaatagtagcttgtccagtccctatcagtccaagcatcttgctttcttttgctagttgacctagtgatgttaacatagtgttggaagctgtaaggtatattatataactcataaatcctattaacgctgctttgtgcttctctttttttgctagtgcagcaggaatacctatagcaaatataacagcaagattattaataatagccattatacagttataaattaggcttccaaatatttgaattggctcccatttaaaaaatggaagtactcctaataacatatcatttgtaagtagtacacctaccaccattaatattcctgcactcgataaatacattaatggctgaaccattgcctttgcaaatgtttccagtcctccaagtagtttttctttcaatcttatccccccctaaaattatatatttctattactaattcatctcattcttataagatttttgttaggtgtagtagtagataaattttttcaggtttatctaatttatacctaaactccttttcaatatatacatttaacttttctaaatattctttatttttaggatgattgttaattaaataatcatacatttcaatcattttatcatcctgacaaatttcattcttaaaaattctttgagcaagaaatttaagatgagttctaaaacgtaatgtacttaaactcgattcgtctaattctaatccataacattctttaatcaaatcaatactaccttttacaaattttaaagtatcatatgccaaattatcatttgattgtaaattgacaaaatgtaaagctatgtaacctgcttcatcttcaggcaaatggatatgacatactctatatataatttctaaagcttttactcctaattcaaactcttttgaatacatcatctttatatccaaaagcattaaattaggtaaaaaaacattatttttcattctatctattgcaaaactaatatgttccactaaagataatatccctttattattaaattttccctcatttcctggtataagacttataatttgttgtgaagcatccatcacttctggactaacattttttaataattctaaaaattttgtttgcatgtggtcttgaacataataaatcttttctattttatcttcattaactttatctcctggacgtttattaaaacctataccaagacctagtaaaatagcttctttcctatcattagttactgtagataatgcattattattaaagatttttactactctcatattgaattaatcccttcctattatttcataatttcaataacagtatcttgccctgcaacaacttcattttctaccatgcaatttatttctgaaaattcgctatgatttaatacaattattattgttgtacaatcaattccctgagaatttattttttctctttcaaaacttattattggactaccttttttaacagtatctccttgagacacttcatttttaaacccctcaccctgtaaattaactgtatcaattcctatgtggactaatatttcaacaccctcatctgagaccataccaaaggcatgctttgattctgtaagcacagttactttaccattacaaggggctacaacaacattactattaggaataattgcaactccatctcccattaacttttttgaaaacacagaatcgtttactttctcaatattaatgctgttaccactcactactgcatgtaacttatagcttttatttttcttgaaaaaatttaacacaatacttcctccttattaaatagatttttgaatttcaatacaaaaaaggcatgaatcctcaggataaaaatatccaagaactcatgcctaatttaatagttacacgtttcaaattatatactcattataaaaccttctcaaaaatattgcaatatttattttaattttattttttaattcgacaatatttatcatgttctttattgtgatttatttttttataaaaagactgaatcactagaatatagtttttcagccttttcaaattaaaaatattgtatttttataatacagctattacttctatttcaactttaacgtcttttggtaatctagcaacttctacacaagctcttgctggtttattttctccaaaatattcagcataaacttcgtttatagccccaaattcattcatatcttttataaatactgtagtcttaactacatttgaaaaatcagctccactttcagctaatatagctttaagattttttaaagattgagcagtttgagcttgtacatctccttcaactacttccatagtctctggtacaagaggaacttgtccagatacaaataataagtttccagcttttatagcttgagaatatggtcctaaagctgctggtgcatcattagtatgtattacttcatgtttcattttaaaatcctcctaattcgttaatctaatacacataaaatgtatcttcatacactattatactatttttcttgtatattatatacactttttattataattctataattttaaaacctttttcttctatagctttctttattctagctatatggtcataatctattgtctctaatataaattccgcactttgttttcctagagcttcccctgctgataatttaccttgattagcacttaaaatgtttccaccattctcacttattattctagttaactcagcaaagtttcctggcttatcttccataattgtactaaatgaatatcttcttccttctttagctaaagcaacacctattattctatataacgtatttatgtctatattaccaccagatattatacaaactacattttcatcttttgctggtacatacttaccacttaatatagcagctgtacatacagcaccagcaccttctgaaactattttttgactttccatcataaataatattgattctgcaatttctgtctcttcaaccactactatttcatcaaccaattcatttattatttcaaaagttaaatctcctggagttttaacagctataccatcagctattgtagtatcattaaatgctgttgttacttttccattttttattgactctttcattgaaggtatatttgcagtttgaacaccgactatttttacattaggatttaatgcttttgctgcaacagcaacaccagagatgattcctcctccaccaactgggcatagtatagtatcaactttattgtctaattgttcgaaaatttcaagagatatagttccttgtcctgctataacatacttatcattgaatggatgtaagaaagttgctcctgtttctttttgtatttcaacagcttttgcatatgcatcatcataaaccgcaccatttaaaactacttctgctccataacctttagttgcactaacttttgctaaaggcgcagttgctggcattactattgtagattttataccagtcatttttgctcccaatgcaactccttgagcatgattccctgcacttgaagctataactccatttgccttttcttcatctgttaaactcgctattttgttacaagctcctcttaatttaaaagaacctgttttttgaagattctcacatttatagaacacatttgctcctgttttttcgctaagtttaacactttcaagtaagtcagttctttttactatgttcttaatggtctctctagcctctttcacatctgttaaggtaacattcatcatttcattccactcccgtaaatccaatttttgtttattactttctatataattctatatcttttttttttaaaaatcaacatgtaaacgatttttataattttttaattaatcacaaaaaacctaaaaatacaacaattgcatacaataaacatatatcttcaattcatttaaattacattaaatgataatttaaaaatattttttacattcttattaaagcaataatatatactttattatttttattaaaatttatattttatattattttatttacccaaaatctatttttttgattttatttaacattattaagattaataaattaataaaatacatgtcttactaaacaacttcaatataaaagaaagttttactttatttttattcaaaattagaaaactatacatatataataaaatacaataaaaaaactaaggtgataattaaattgaatatttattttatataacaatcattttttattaaaaggtattttttattttaacatatatttaataaggctaaatagagttattattttaatttcatactttactttttctataaacctattataattaaagtataatcatttttgcaacttgtttattttattataaaaatgtgaaacttattacataaggaggaatttaacatgaaaaatcatacttataaagaaatcaaaaacatatatggaaaaataagcccttttgaatttaaggacaaattaatagatattgcaaaatacactgcaaaagaaaataacagagaattacttgatgcaggtcgtggaaatccaaactggacttgttcaactgctagagaagccttttttacttttggtcatttcgctattactgaaactcgttctaattgggatttaggtcatttggctggaatgcctcaaaaaaagggtattaaagaaagattttttaaatttataaatgaaaatatagatatgcctggagcatatttagctagagatattataaactttggtataaatgaacttggatttgatggagatgaatttgttcatgaactagctgatggaattattggtgataactatccacttccagatagaatgttacctcatatggaaaaaatagtacacgattacctagttcaagaaatgaaatatgatatatcaggtaaatatggtgatgtagaaatttttgctgttgaaggtgctacagctgctatgtgctatatatttgattcattaatggcaaatgaacttctaaaaaaaggagatacaatagccttaatgactccaatatttacaccttatcttgaaatacctaaccttcctcgttacgactttaaagtggtaaatataaatgctaatgaagttgatgaaaaaggtgctcatacatggcaatatacaaaaaaagaattagagaaacttcgtgacaaatctattaaagctttattcgttgttaatcctaataatcctgcttctatagctatggatgaaatatcttgtaataatctaatagatgtaattgaaaattataataaagatttaatgataatatcagatgatgtatatggaacttttgtagaagatttttcatccttaatgtcaaaactaccttacaacactgttggagtatattcttattcaaaatattttggagttacaggatggagacttggtacatttgcccttcataagaaaaatgtttttgataagaaaataaatgatttaactggagaattaaaaaaatcagtagataagcgttacagtgatatgagtcttaacccttctagtctttcatttatggaaagagttgttgctgatagcagacttgttgctctcaaccatactgctggtctttctactccacagcaagtacaaatggcgtttttctctgcttttgcattgattgacaaagtagatgcctacaaaaaactcaatatgagtatctgccatagacgtcaaaaactattatttgaagctttagagcttccaattaatgaaaacaaaaacaatgctgcatattacactcaatttgatattgaagaatgggctaaattaaactacggagaagacttatttaaatttataagtaaaactgcatctccagtagatgttctttataaattagctaatgactattcagtagttttacttagtggaaatggattctatggccctgaatggtcaattagaatatctctagcaaatctatatgatgaagcttatactaagataggaaaagccataagagagatattaaatggttatatcgttgaatggcaaaaaattaagaaataattatattacactgaaatatctaaattatatgaataaaagagtttatgtagaccttaactactttttttgatataatcctatcggaattataaattttatttatgaaaggcagagaatcgtatgagtattaagaaaaaagttgccatagtttttactggtggaactatatctatgacagtagatgataaagtcggagcagctataccaactttatcaggtgaacaaatactatcaatggttaccaacattgataaagttgcagatgttgaagtttttaattttgatgaaattccaggacctcacataacaccttatagaatgatggaattgaaaaattatgtaaatgatttattagcaagaaaagatattacaggtgttgtaataacacatggtacagatagtttagaggaaacagcttattttctagaccttacaattgacaacatcaaacctgtaatagtcacaggtgctatgagaagtagttctgaacttggatatgatggttcaagtaatttatctgcatcagtttgtactgcagtatccaaagatgctatgggaaaaggagtccttgtagttttaaacaatgaagtattattagcttctgaagctactaaaacaaatactctttctctaaatacatttaaatctctaactagtggtccattaggaataattgactgcaacgaacttgtccttacaagagatattgtaaatagaacaattatagatactgataaggtagaatctaaagttgccttatttaaagcatatgtaggagaaaatgctgactttataagatttgctgttgatagtggttataaaggtatagttattgaggcaatgggtataggtaatattcctcctcaaatgctttctggagttgaatatgctagagaaaaaggacttcctgtagttatagtttctagatgtcattcaggtagagtattcgatagttatggttactttggttctggtagagatttaaaaaatcttggttgtatatttggtggggacttgccaggtcaaaaagctagaataaaacttatcttagcacttggaaaaactgataaccttgatgaaatcaaagatttctttgaaaaaggaatctattgctaattctaataacttctatttaattatttagttcagtttacaagaaaatacacacaaaccataaaatgagatgttgacaacataacagacagtatgctcctgtaaaaggtaacatactatctgttatattgtctggattcccaaattagctatttggaacttaactaaaaaatcctaatataagggcaactattataatggcaatcggaatacatactgtgtaatcctgttccatagagtcatcatctgaatgtagttttacaattcgcaatttagcaatcagtttgaagcagaaatagcctattattgttccaattacattcgtgagtaagtcgtctatatcggttgctctgtgtaacgtaaaaagctgaatagtttcgataaagagagataatccaaaaccaatcaagaatgtatttctcaaccgttcaaaggttttgctgataagcggacataaaaaacctaatggaacaaaaagtaaaatattcaaaataaaactcaaactaaatccatcactaaaaggaataagatttatgtttggattaaagaacgtttcccctaactgtgacagtcttatatattcactgaatgtagggataccaacaatatgcgatagtgttaaacataagtagtaatacattgccagtgataaaatagatgtttttacctttggaatatcactatttttcttgaatattacaactaagaaaataccaatcaagataattcccaacaagaaaataggattaattaacaataaatctttgatagcttcaaacagactgagttgaatttctacacttgattgattatttgatacagtctccatttgtacacaccccctcataacatttcaattatttctaaaaaacaaaatagaagataaatcttaaaatcatcctatcaaaatttttaaatttgcctttatcagtttataccaccagttaattcctgtcttacttctgtatggtattcttgggattctttcatcaaattagacaaaaaaatggttaccatatcaataaactggttacgctccatatctcctgaagcaaacatcccctgagaataaatccgtatcaggaatctccacatctactgcacctatcacaagtcatttgataacatcctcaaacaatcccaacttggatatatcagcaacacccattagaatactactgctgaccatccttgttttcctggtgataattttaatcaactgggaagttgaaacgcctatcttttttgcaagttcctttttagaaacatggtagttattatatgaatctgaatctcgttgtctgggtgtttaagataaagcatagatacgcaccttttttgcctgttttcattatataaaaaaaattttaaaaatacaataattatatttttttcgtttaagcttagagcagttccttgatgaacaacactttagaaactgaataatttacataccacttaatacattaacacgatttaacattaattataataatatttaaaacaacaattagagtgtataagaatgaactttttagttctttaatcatttttttgtataaaatcaaatctatttttgtaatttcaacaatgaaaaaaggcttatctctattttgagacagcctcatttattttataaatttatatttttgttcatatttttgagttatttaacaactatatttactaattttttaggtacagctacaactttaactatagttttaccttcaactaatccttttattttttcatcttctaaagctaccttttccatctcatctttagatatatttgagttaacagttaattttcctctaacttttccattaacttgtacaacaacttctatttcatcttttactaaagctttttcgtcatatttaggccagtctatatcaaatacacttccttctttacctatcatagtccatagttcttcacctaaatgaggggcaaatggtgcaattatagttactatagtttgtacaccttcttttataactgcttcgtttatattatctaactctttatatttatacatatcatttattaattccataagagctgatatagcagtattaaatccgaatttttcacttaaatcagcagtaacttttttaagtgtagagtgtatagtatatctcatatccttatcttgggaatttaattctccaaactctacatcctttttaaccacatctgctaactcgtcaaccaatctataaaccctatttaagaatctaaagcatccatcaacaccttgctctgaccagtctaaatctctttctggtggtgctgcaaataatacgaaaagtcttgcagtatctgctccatactcatctattatatccataggagatactgtattccctttagacttactcattttagaaccatccataagtaccattccttgagtaagtaagtttttaaatggctcattgaagtctaccattcccatactcttaaatgcctttacaaaccatcttgcataaagcaaatgcattatagcatgttctactccacctatatattggtctactggatgccatctattaactaattccttactaaatggttcattttcattattgctatccacatatcttaagaaataccaagaagaatcaacgaatgtatccatagtatcaacttcccttctagctggttttccacagtgaggacaagttgttgacataaattgctttgaagtcgtaagtggagattctccctttccagtaaattcaacatctgttggtaaaagaactggtaaatcttcctttttaactggaactattccacattcatcacaataaaccacaggtataggacaaccccagtatctttgtcttgaaactaaccagtctctaagtctataattaattgttctctttcctctaccttctttttctaacttatcgattattccttcaaatccttctgaagcatctaatccattaaattcttctgaatttatcattttgttatcttctgttattacatcaattatgtctaaattatatttttcagcaaaatctctatctctttcatcatgtgctggaactgccattatagcacccgttccatactcaactaatacatagttagctatccatagaggaactttcttgccatttaaaggatttataacatatctacctataaacattccttctttttctacatcagctgctgttctttctatttctgtcatagtatgcattttttgaacaaaagcttcaacatctgcttcatattcagtccctgcaaccaattctttaactaattcatgctctggagcaagtaccatataagtaactccataagttgtgtctggtctagttgtaaatactgtcatagatttatcagttccatctatatcaaaaactaaatctgctcctgtacttttacctatccaatttttttgcattgttttaactttttctggccatccatctaatgtatctaagtcattaagtaattcttctgcaaattcagtagtcttaaaataccattgttctaaatctttctttaatactgttgctttacatctctcacatgctccttgaacaacttgctcatttgcaagaacagtctcacaagaaggacaccagttaacatatgattttttcttatatgcaagcccatgctctaaaaacttcaaaaatatttcttgtgtaaatctatagtattctggagttgaagttgcaacttctttatcccaatcataactaatacctaataaatttaattgctctttcatttcttctatattttccattgtccatttatgcggatgtattccatgttttatagctgcattttcagctggtaatccaaaagaatcccatcccattggatgaagtacattatatccttccatttttttgaatcttgcgacaacatcacctatagaataatttctaacatgtcccatgtgtatttttccagatggataagggaacatttctaatgtgtaataattaggtttttcagtttgtgcagtatccattttatactgattattatctttccaaattttttgccatttcgattctacttctttaaaattatatacgctcatattttgcctcctatttttaattgtgtataactaccttatttagtattatttacttataatttccaaataattctttgaaaataaaaaatcctcgtcactaaacttacgtttagggacgaggataaatcttcgcggtaccaccctaattagcctactacatatatagactctcttagatagcttttaatccagccatggagaatagattttaatctagtaagttcaaagttatataatattagttctcaccttccactaactctctgaaaaaatataatcttttactgctctagtctattcaatttaatataatttttgaaattttctaattataataacatatattatcatgtttatgctaatgtgtcaatatctatataaggtgcatctttccataatttttctaaattataaaaccctctattttcctcattaaatacatgaaccattatgtctccataatcaaggagtacccaagtttgagttccttgtccttctttacctcttggctctaatcctagttttgctaattcatcttccacattgtcagcaatagcttttacctgtctctgagaagatgctgtagtaataataaaataatcacacaaactagaaacttttcctatatttattataactgtatcttgacccagtttatcttctatggcatcatatgctatttttgtcatttgttccactgtcatataaaaattcctcactttcctaattaaaatacacttagttattgtaacatattaatacgattttgtaacatagtcaaatttaaatttattaatatgtttgcctttatatagcttttttataataacttttctttaattagatagtttcttgccataactgttcttggatgtatctcttcttttttattgatgacaaacattaaagtattattaaaagaagttaaaagtgcttcatcaagcttccctccatatgctaattctcttaatgtatctacaactggaaattttcttccttcttcaattaaatcagctatgtaaattattttttctaaaagagacatgtcctctctccctgttgtatgatatttgattgcatttataatatcttcatcttctacttcaaattcatactcgcatatgtacgccccaattacactatgagacaaggaacgatttccatcctctattgggtctaaatatatttcatacttatttacataatcctctatttccttgtcacttaaatactttgcacaatcatgaatcattcctgctaagtaagctttttctttgtcacatccataaatctcacataatttttcagcacattttgcaacatttcttgaatggctaagcctccccactggtagcatttgatttagtctttggttaatattttctaagttcatttaatcatctccatattgatatagtttattttcatataaataattttctacattttcgggtactaagtaacgtattgacttgccttcatttagctgttcccttatatatgtggacgatatatccagtgatggaacataaactgttataatgtcagcattatacttcttagttagtttttctatagtctcttgtgaccttaacaaactaattcctggtctagttgcggctataaaagtagctaactcaaagtttttctttacatctttccactcttcaacactacaaattgcatctgcacctgttataaaataaatgtctgcatttttgtattttttctttaagtattttaatgtatctattgtataagtccttttctttctttcgatttctacttttgaaactaaaaaatcttcgttgctttcagttgctagaagtgtcatattatatctatcatacttatctgtagtgatacataatttatgtggtggatttcctgatggtataaagattattttgtcaatgtcatacttgtctctaataaattctgctgttgctaaatgagcatagtgtatagggtcaaaagtacctcccaatatacctattttgattttgcctttatggcgattaaatttctctagtttttcagtatttttcaactctgccatcttaactagattttcacttctcatattttgtctccttttaatgttataatactattgtaccattattttttatttcttaaagcttataatttgtttttttgggtatataattatatttatatgctaaaaaacactttaaaaaataattatttaacatgattctgctttactttttaataaaaataactttttactattttgtcttaattttgataaaatataacatacaaatataagttttttgttaaattttattagttgcttttgttaatataattacatataaaaaaggaggacttatgggtataattacaaaaatagaacaacaaaaaagaaatgatgatagagttaatatttatgtagatgataaattttttattgctatatttaaagaacttgtttatacatttaatttaaaaaaagggaatgaaataaatgaagaagaattaaaacctattttagatgatgaaatgtatataaaagctaaaaataaagcattaaatattttatctcatgctgaccaatctgaaaaaaaattaaaagaaaaactatcatcagaatttgatgaaaatataattgagagggtcatagattttcttaaaagttataatctcgtaaatgacagtgtattagctcaaaaaattgttaacacaaatgttaacctaaataaatgtggcaaaaacagaattaagcagaatttatataataaaggtatcaatagaagtacaatcaatgaagcagtatctgaattagacaaggacactgaatttgaaaatgctatgtatctagcaaaaaaaaggtatgaaagagtaaagaaagaagataaaaagaaaatatatcaaaaaatttctcaacatctttcctataaaggctttgattatgatattattaaaagagttttaaacaaacttttaaattttgatgaatacgatatataagtataaatactagggaggtaaattatgaaattaatcattggtggcttaagctttttattaggattatataatatatatcaattatacagagaagatagtatgagataaatattattttttaaatgtaatatttattatggaggagaaatacaatgaaaagtcaaaaaagatttaaaattttagatattgatgtatacctacaaccatttgaatctgatataaaaaagcgaatgaaacattatgaggatatgaaatcaaaaacattgaaaaactataaagattttagttcttttgcaaatgctcatctttactatggatttcatcagacaaatgatggattcttctatagggaatgggctccaaatgcagatagtttgtcactaattggtgactttaataattggaatagaaaatctcatcctctaagaaaaattgggtctggtaattgggaaatatttattcctggtcaaaatagcttacctcacaaatcagaggtaaaggtacaagttactgcaaatggaaaaacatttgaccgtataccattatatataaaaagagtaattcaaaaagattttggtggatttaatggacaaatatggcaaccaaaaactccatttatctggactgacaataattttgacttaaaaaacataacttctccactaatctatgaatgtcatataggtatgtctactgaaagcgaatctattggaacttataatgaatttactgaaaaaatacttcctaagataaaaaaagctggatacaataccattcagcttatggctattatggaacatccatattatgcatcttttggataccaagtttcaaacttttatgcaatctcatctaggtttggtactcctgaagacttaaaaaacctcataaacactgctcattcaatggggattgctgttttattggatttagttcattctcatgctgtaaagaatactttagaaggaataaatgagtttgatggaagtgaacatcaatttttccactcaggttcaaagggaaatcatcctgcttggggtacaaaactttttaactatggtaaacctgaagtaatacattttttgctttcaaatataaaattttggttaaatgagtaccattttgatggctttaggtttgatggtgtgacttcaatgttatatcataaccatggtcttggagtttcatttgatagttatgaaaaatattttagtatgaatacagatattgaagctataacatatctccaatttgcaaatgaattaataaaagaaattaaacctaattcgataagtattgcagaagatatgagtggaatgcctggtatgtgtatccctataaaagacggcggaattggatttgactatagactcgcaatgggagtacctgatttttggataaaaactatctctaacttatctgatgaagactgggatttgggaaaaatgtggtatgaacttactactagacgacctggagaaaaaaatataggatattgtgaatcccatgaccaagcattagttggcgataaaacaattattttttggctagctgacaaggaaatgtactggaatatggaaataaactcaaataaccatgttatcaatagagcaatatctcttattaaattaattaaattaataactttttctctagcaggtgaaggatatctaaattttatgggaaatgaatttggacatcctgagtggattgattttccacgagaaggcaacaattggagctataagtatgccagaagacaatggagcctttcagaagataacaacttaaagtataaacaattattaaattttgataaatctatgctcgaacttacaaaatacagtgatatttttatccaaaatagtcatgaacttatacatatggataatgataaaaagattttggtgtacagtaagggcaaatatttatttatatttaatttccaccctaatctaatacaatcagttgatatttcaaagtttcaaaatacaaactacaaaacgatattaaatactgatatggtagagtttggaggaaacacaaaaaaagaaaacttaagagattatgatgtatactttagctcaactcctccttcttctaaaatgcctattgcctctcgtacagcaatagtacttttagataatggcatttaaatatgagccaaatatattaggaaactgcaaatgtagtccagtataaggcaaaaaaataaaataatgaaagcatggcaatatacctgttcaacatgctaaaaagacatattgacaaatcagtattaagccttttagctcccaaatatgacattattataatccacactctaacagtttgttggtttttctagtatataacactcatattaaagtaaacactaaaagccaaataacaatttaaatacaaaatgttatttggctaatttagtttgatactatttaactatcttttacattcagttctataatttccaacttttaatttgtggtattatattcatcttaacagtttgattctttaaagcttttctaaatttctcagttgaagaatctttaaacattttactagaagcactcttgaggtcttctatagattcccaatgttgtatcataatccacttttgagacttttcatcatataaaagctcagtatcaataaaaccagattgaatagaatgaaattttaattctaagtcatttacaatttctataaactcttcttttgataaattttcttccacattaaactcaactatttctgtaataattttcatatgtaaaacctccaatttattttcctatatcatatcaaaaaataaattggaggtattgtaaaaaatcgacagtataattataaatagttgtactttatattttctttaatcgtcttattctcaccaataaatttaattggtgacgtccctgaaaattttttaaattcttttataaagtgtgcttggtcatagtactcattttcataaataaaatcaaaaagttcattatctttataattataaataagttgactacttgccattttaaatctgtaaattctctttaaaatcttaggtgtataccctgtatattttaaacagattctttccaatgttttaatatttatatttgtattatcacaaaatgcttttatattgctatatctattatcatatataaatgaatttagaagctttacagatttatttgaaattaaatcttcttctaatatggataataacatttcttctaaatataaaacaattttttctactgattgtgttggatttaatgactcttccaattttttggcaaatagttctgatactgcttctaagtcaacaatttgtctgttaaactctgaaattggtatctttaaaaatggatagagaccaaatggataaaaagaaatccctataacacgtatatttccatgttgaataataaatccatgtttatcccttattccattaaaatgcatattactagcagtatagtcttgattttcaattttatattccataacatcagaaagattaagaataatatctatactgtctgtaggaagtaacttattatttaacagtatatttgattttgtttcaaaataccaaataaactttacccacggctttaaacgaacatttttgattgaatatcttgtaactgataacattgtgaactaacctctatactaaaattttttaattatgtactccatcttaatattatacagtataatttatgctatcataaattttagttcactttatatttattttatacattttttcaataccttagaaataggaagcgctattataagacctatcaatacttgcattaagttacctggtattgaagtaagaggtactataaaattaccataaagtataacttctgttatataatatccaaataacatccaaattgatgagacacatattcctattacattgattaaaaaattattcccattattaccatttgcccatgcaatctttccaagtaaataacccataactcctctaactataaaggtaaacggtgcccataaagtccacccagatattaaatcaaaaagtgacataccaatagctcctgataaagcaccttttttacttccaaatactattgctgatatgaacaacattgctgttcctaaatgcacaagcccaccatttatagatattggtaatcttatatttataaatttagttgcaataaatactaatgctattaatagtgaggtttccaccatgtctttcgttgtaaatttttgcttagctgtaacttccatactatatccccctatctattaaaaataatacttattaaataaattcaacaaattttcatttcctttgaatcctaatgcacttaaacttttatccaagacatttagtacatgctctattttatttagatttgcattctctcccatatgacctattcttaaaatagtatccatatattgatttagtgatgttgcaacaagtgtattataatttttaagcatataatcagtaagttttaaagctcctatactttcaggaatttttatagctgtgactgtattagaatatccttcttctaaaaatagttctagaccatattcctcaatagattttctaacactataagctatcttttcatgtctatctaatacattttctattccttcttctaatatattatcaagtgctttatcaagccccattatgtcacttattggcattgtataagggaagtattttttttcataatagccttcccatatatttaaattacaataaaaacctattacatcagtttttctattttttatacaattttttgcatcttgacttattccaactatagtaagtcctgctggtgcagaaatagctttttgtgaaccacctaatattatatctattttagattcatccacacttaatctttctcctaccatacctgctacagaatcaactacagttaatattccatattctttaagtaatggacatattttgcttacatcatttaatacgccagttggagtatcacaatgcactactgttgcatatttaaaattactatcctcatctaaaaatgctttcaattcatcaatatctatacttttagtatattcacttgaaaaaagcacatactccccaccatacattgttacaaaatctttaaaaccttctccatatataccattgtcaattacaagtactctatctcctttttcggtaagtgatgcacatgctgcttcaagccctaatattccttcaccactcaatatgtaaacatcgttttttgttccaactatattgccaaacttctcgcatgtctttttataaaattcaacaaaatcaatatctatatctggatttgttgttttttctgctcttgctaatcttacattttccctagtttcagttggtcctggtgcataattaatcttcttattcatatatatcagctcctatttattttctatacgattattatacaaaattttcattttatatggtacaattttatacttttttagaattgtaccgatacattttctaacatgaataatatcagtatattagatatattattgattacataataaaatacagagcaaacatccgtttaaattgtttgctctgtactatgctttaacctatttaattatgaatctctttaactatattttttatatgctttttgctagttaaactaaccacaaatatttgcattttattcactgtatcttactctatcaataagagattctttattaaaacttcgtcctatcaaataagttgttataaattgagctataagaatacacacaatcatcaacaagattggtactattggcaaagaatatgttgcataagataatccagtcttttttagaaatataacagcaatataccctaatatacctccaaataaaatacttcctatcatcattccagaagtgtaatacattgcctctgaattaagcattttcactaattgtttattagtaagaccaatagcttgaagcataccaagttctttttttctagtaactatgctagttatcattgtgttgacaagattcataaatccaatcacacctattatgcctgttagcgtgtatcccattatctttataaatgaaataacagccttatttgactcaattctactatctataaaatcagtctctaaaaatccattatttttagcaatcttcttgatactatctttgatttcttgatactttccttcttctgtatatattcccaagctactagttgaatcgtattttaaagttctatcaataaaatccttccctataccaaaacttggaacccccatagctattgcttgaactttaaattctttttttatctttttatctccatcatataaagttaatcttattttatctcctgcttttactcccatttcttttgctgtatcaacatgagtaattactatttcatctccagtttgcagtctttcaagatttatttttccatctattagattcttgtttaatgattttacatcattttcatttatactttgtaaaaggtcatacttaaattcaacatcatagtcctccataccaatttttacacttcttgcagattctattcttttaattccttccatgttctttatttgattaaaaaaatctttacttagaggattatccatttgtaaaatattcaaattatttttaggatttttatcactgttcatttcataaccagatagtctaacttctatatcataaggaaagtgttctcttgccattttctcagcatcaaaactttctaaagcagttgatactgttataaatatagttccactaagtataagtgatgccaatgtcatgtaagtacgttttttatttctttctaaattggcatgtgataatctctttagatttatatttttatatccttttctcttactcttattacttattttatttcctgtatatcttactgcgtcaacaatggatacttttgatgctactttcattggttttaaaagtgataaaacaacagatataaagcttattaccacaaccgataatataactggtaatcgtgatgattttacatctatatccataaatgattttattataatatttgcaagtacatagcctaaaattattcctattggtattgctattccggctaatataaacccttccttaaacactatattttttatttgtttcttagttgcaccaattgctctaagttttccaaattcttgaacttttgtaactattgaaatataaaatatattgtatattactaaaatactagataatacaattactaatcctacaaaacctccacccataatcgtttccatatctggttttaaagcatttatataattttcatttacagcagtattaatagtatcaagtcctatatcattagcaattttatctaatttttcttttgcttgctctattgataaattacttttatcattaaattttacataaatattaaaatcttcttgtgacatatctctagtatttctcatatataattctgatataatagcataataatatttacctgcttcagatatttcgctagtttttaagattccacttataacgaactctttttcaatttttttatcatttttatagtcattataagatatttttatcttttcacctaagtctttatttttataaccaagtgcctttaaagctccactatctaacacaatttcattctcttttgttggcaattttcctttgataagttcaaaactatttaatttcaaagcatcttcattcatgtatgctagagaaatatttgaatcatcttccagtttttcaacacctactccattcatttcaccagttaattcaacatctgcatgattactcaatatatcagcctgtttttcatctacatttgctaatataccttgataattacctgaatactttatagtattttctttttgatatgctcctgcatcaacaatataaattccaatagaagaaagcattaaagtagaaagtattatagtgattattattagaatactttttgatttattttgttttaaattactttttgctattttagtagtattaatcatttttatcaccaacctttgacaccctgccatcttctatgaatataactctatcagccatttgggctatactgtcatcatgagttatcataactagagtttgactgtacttcttagacatagattttaatatactcataacctcatcagatgttttagaatctaggtttccagttggttcatcagcaagtattatagctggtcttgtagctaatgctcttgctattgccaccctttgttgttgaccacctgataatgtatttggtaaaacgtcatgtttattttcaagtcctaatgatttcaaaagttcttttataaaagattcatctacttctctaccatctagaccgattggcaacactacattttcccatacattaagagatggaattaaattatagctttgaaatataaaccctatttttcttcttctaaacacagctagttcttcttcttttaatgtaaatatatttttattatctatatacaccttcccagatgtaggtatatcaagacctccaatcatatgtaaaagtgtactttttccagaacctgattttcctattattgcaacaaattcaccttcatttatttctaagttaacattgtccaaagctcttactaagttttctccttttccataatgctttgataaattttcagtatatagtattttcataaaattatcccctcattctaagttatattaccccatattttattaattttttatttctggagctgtttatacttatataataaatgtagaggcttacattttcctttcatttaatattacatagttgtaagaaacaaagaaaacttactccctatccctacttttgaagaaactataatatttccaccttgttcttctaaaatctttctacttaaatacaatcctaccccactaccttctacagattcaatttcatcagcagaacctctataaaaacgtttaaatatattattaaactcatttttttcaatccctatgccattatcctctattataattttaaagaaattagcagtttcttctacagatatatttatttctccatttacctgtgtgtactttacagcattatctaatacattaaaaatactctcctcagtccactttttatcatgtggtataattctactgttaaattcatttaaatttaatgttatacttttgctcttagccttaggggtaacactttttactgcatttagaatagtattttttatatcattatcttctttttttatgtttatcatgctaatttctaaccttgatatgttcactaaagaatttattaaattttctaatttatttatagaagccttattggttaataagaactcgttggcttcatcttcttctaatttttcttctataagtaatgtattgtataattttaaggatgctaaaggagtttttaattgatgagaaatatctgttactaatgattttacactttctttttctttttctaatttaataaactttatctttaaacttctattaagctcatatagacagttatttatcttactaaatgtaccttctttaaaatactcattatattctactagataaccagtttcttctgactcagtagtgtccttcaagtagttttcttgtgccatcttatctactataaaataaattttactcaatcttttatttatgtatcttataaaataatatattatacctataactactataaacatcattaaaaaaataaaaaatgattccttaaaaaaagattttaagtataaactaaaatttttatcatttgacattttattttccaatccatagccaaatttcttaaatgccttttctccagtagacaccttactataatcggaattataaatagaatttactatatctatttcatcattaggatatttttcaatcaatattccagcaatattttgagtattttttatttgatgttcatacaatttatgtaatctgctatattcaaaaagtataaatacaagggttactattagtacagataaaacagaatatacaataactcttctcattatataatcatctttcacacttaaaccatctttgaggttcatattttttagcatttttttatactcctttctccccacatatatccaacccctcttactgtttttatatatttaggttcagatggatttttttcaaccttttgtctaagtcttcttatatttactgcaatcgtattatcatctacaaaattaccactactatcccataaagattctaacagttgttctttagtcaatgtctgcatagaattttccatcaaatattttaatagttttgtctctgtcttacttaaaattatctcttcttccttatcatctgttcttataattaatttattttctatataataaaagaataaatcatcacaaactaatagagtataattttttactgtatttactcttttcataagcgcattcacttttgatattaataccatcaagctaaaaggctttgtgatataatcatctgcacctaaatcatatcctgtgacaatatccacctcttcatcaagagctgtcaacattattatgtaaacatcacttttctttctaatctcctcacaaaagtcaaaaccactaccatcaggtagacctatatcggaaataattaagcatatctcttcttttgcgaaaatattttttgcttcttctataccaaatgcactaaaaacattgtatccttctttttttaatttaaaactaattcctctatttaaagatttgtcatcttccaaaagtaatatattattcatccctatatcctccatcatcatatatactagctaaattatatcatactaataaaatcatttttttatcaatttgtaaatatatcagaagttgttaatatgatttcatttacttgaataaaaactaaaaatccccataatactatgccatttagtgtaattatttttcataaaatacaattttatttaaaaataatcatgttaaagcataaaacaaaggaaattagtatttatataactaatttcctttgctgtttactattatctaaaattaaattactatctactaattttgctcattaatttttattttgactttttatcctttaactctttttgattaaaattcaataaacatatcaatgtacttgaaactataaatataattatactatttgaaaaacctaaatctcctgttttaggagatttttctttagcttctcttttagatattccttgattagaactttctctagcacttgttttatctaagcttttatttttgtcactatcagagctttttatattattagatagattctcttcattatcattgatatttttttcattttcacttaatatcaaatcactctcatgattcttgcttattaactcatctttagatttaataccaattcttccatctacattttttgatatttcttttttgtactctatatattcaatgactgcactctctaaatttccaaattcctttagtattggctcttttgaaaaacaaggaaattcatctccacctgaggctatataatcattcgttgcaactacatactttttatttaaatctaatggctttccttctttttgaatacttgttattctttcgccttctttttgtttaggattaaagtagtatgaaattcctcccacttgcaaaaaggctgaacttttttctggataaagttttactccatgctccaatacatctttaatctgtgctcctgtaagttctttggtaactatagtattgctaaaaggaaatacatctacaatatctcttcttgttatattgcctttttctatcgtatctcgaatattccctccattaaataaagaaatatcagccttagttttatctagtaaaatgtcacttattaaattacccaaattagtttcttttgtccttacattttcatatgaaccatctagagtatttgtagttgcacctataactttatctaatattttttcttgttgttcttttatttcatcaacctttttacttacaacgtagtcaagcttatactttaatgcttcttcttttccaattaatctaactgatttattttctatttttatattttctacatcattagtatccaaagttagttttatctcgccaatattttctaaatattgtcctgcacttacaatcaatgtatcacccacttgtttaccattttcaaacttagtgtggctgtgtccatcaataatcaaatcaattccttgaacctcatttgctatatctatactatttggcttacttaaactatttgtaccaatatgacatattgcaactattacattggcaccttttccttttaattcatttacttgttctgttgcactttctataggatttttaaactctaatccttccacatttttaaatccagttttgttctttgtttcctgggttgagagtccaaaaaatcctatttttattccatctatttcttttatatcattactatcaaaaactttttttccattttcaaaaatatttgatgataaaaattttaaagtattctctcctaaattagcacttttagataactcaaacagtctatcttttccataattaaagtcatgatttccaggagtaatatagtcatatccagcacatttaattaattcaattgcacttttccctctatccatatttactattggaagtccatgcaaacaatctcctgcatctactaaaattgagtttggagtttcttttttcaatgtggctagatttcctatttgtatatggtcatcaccttcagcatatcttccatgtatatcattagtgtgaaaaatggttatttcttcaaatcgctctagcccataagaaataaaactctgacttgttgtaattagaattataattaccaaaattaaataccttctaatcttcaatataaattagcctcctcaaattagttttagctttaatataaaatttatattttacataaaactttttagataaatattaaactatagtaagattgattagtgtaatttttaatatttatctatcaatttaattttgtccatatccaattagttttaatctaattacattttttcacatctatatttttcttttattatataaaattattattttaaaatcttttcaactggtctcttttaaaagtccattgaggtattgtcaaatcaccttcaaaatctaaactataccaaggactcaaatttggatttttacgattaataagaagttgcgtttgttgtgcaggcatatagctttgggctatcataaatacctttttaccagtcttttcattttctgccatatccataattatacttgcatgtcctggacttccaccaactataaacacatctcctattttcatatcctcaacttttacaggctccaattctttttcaagagataacgttcctgaatatgcaaacactatatccataaactttctgaaactctcataagatgttgaatattcagttgctttataccagcttgaaccactatcttttactgaaattctatatccttgtgcccattttgaatacttcgccttaaaaccatcaacaaaatcaaaacttatttcatcatatagtttattctgatacaagtattctgctctcataagcataatcgcatctgcacattgatgcaaatctctattgccaatatcaacatcaaatacactatcataaataccttttgattccttaattcttccatcataatactttactttctctccataattttttagcttagtattcctaagaaatgattcaaaactacctttttctacatcaactcttttaaatccttttggtggctcatacctatctttcaatatatttgcatctttatgtactattataggctgttcatcttttttagaattttgaattttcttagaaccttcaaccacttttttatcttctccgttactacaaccaactaaggttaatgtaatcaatgacaaaatagtaattttctttaatactttcattaaattttcctcctttaaatactcctaaatataattttcacttttcgttctccaaatttttatacattgctatataaaaactttatttgataatatttcttgactcaaatacacatttattgttatatttaatgttaaaataattataataggatatcataataaaaacaaacaacagatttgtgttaattttagaaaggggaaaaaatgatagatttaactttacttggatgtggtggaaatgtacctatgccaaacagatttctatcctctgtatttataaactataaaggtagaaaaatactaattgactgtggtgaaggtactcaggtatctatgaagctaaaaaaatgtggctttaaagatatagacttgatttgtataacccatttacatggtgaccatatatttggacttttaggacttttatcaacaattgggaatagtggtcgtacaagtgatttaactatagttggtccagttggaatagtcgattgtatacgttctatgagaaatttagtagaatatgtaccatacactttaaaaattatagaaaaccctcaaggcaatttttctttagataataaagttttaagaaatttagaaatttcaacaatcagtttagaacactctatagagtgtttaggatacagttttaattttagaagaaaccctaaatttgatatagataaggcaactaaaaacgaagttcctaaaatattatggaacaaactccaagaaggtcaaaatatagttttaaattcaaaacaatacactccagatatggtcttaggagaattgagaaagggagttaagataagtcttacaaccgatacaagacctatagaatcaataccagatttcataaaagatagtgatttatttatatgtgaagccatgtatggtgatgatttagatatatcaaaagctgttagaaacaaacatatgacttttagagaagctgctaatcttgcaaaacttggaaatgtcaaacaacttttactgacccattttagtccttctttagacatacctagtatgtatttagaaaatgctactaatgtttttgaaaatactattcttggagaagatagattaagcttgcgtttaaattttgatgaataatttaatggaatccttatttctaaaaatttggaataaaaatttagggatgaattttaccatgataaaaatagtttaggtaaattcattcccttaattgcttgtcaactatattagctataatctaaatattatttagacacatttccagctacatttaaaacatcccatgttcttgcaaatggtggggcataacataaatctaacattccaagttgacttgtggtcatttttccaaagatagcagctgccaatacatttgctctttggacagcatccttaaacccagccacttgtccgcctaaaataacttttgtatctgcatcataaataagttttacatatattttatttcttcctggataataatgagtttgattataatcagaaataaatttagatttgacatttatgcctaaatctttagcttgcttttctgtaattccagttgatgctgcctccatatccataatttttatacaacttgaagatagtgaaccttgataagatacttctcttcctgctaggttttctcctactatcctacctaatttattagctccagtagctaaaggaacatatacattttcattacttactatattctttatagttgcacaatctccagcagagtatatatcttctacagaagttcttccatattcatcaactactatagctccattttttagcatttttatattagtatttgacaaaaactcggtattaggtctcacaccagtagcaattattactacatctgtatctatttcccctttgtttgttataactttttctactttatcttctccacaaagttctacaaccatttcatccaagtgcaaattaacattatgtctatttatttcttcttctaatacatccgtcatctccttatcaaatacttgtggcaatattctatcttctaactgaattacatctacatctttacctaatttcttacatgcctcaactgcttctaaccctataaaaccagctcctattattgtcactcttttattatcttcattacttaaaagtttttttagatattctccatcatataaactttttaatgtagaaacattcttcaattttatgttttttataggaggcataatacttcttgctccagttgctatcatcaatttatcatagtaatcttcatatatttcatctgtttttatattttttacttttattttcttagattcactatcaacctcaacgacttctctaaatatatttaaatcaattccagcttctctaagtttctctggtgttcttgctaataattcatcagcatcatcaaaaaaaccaccaacaaagtatggtaatccacaagcaccaaaagatactatttcagttttttcataaacaacaacttcatactcaggttttattctttttaattttgctgcagcactcataccagctgcaacaccaccaattattactactctcattttatctctcctttgatgtctagttaatttcttcacttattttaagcttttcatttgatatatattctatgtaaacatttttcataacaatttttagttatttatttaacatattttaatttgaaatcaaatattataaaagctattttttattttcttaccacaattcaaattctttaaacatttattataccctatttttctatacttaatcacatttttcaaaatcaatttattttactctatttaagtaaattgtgatataatattgacatttttttaatatattggtatcatttaaacttagaaaaatttatttttaaataaaaggagaaaaaatattggaaagttcatttttatcacaatttcttatgattacagattttaaaacgatttttttcataatattacttctaggtacattctttattgttagacaatttgaaaagaaaaaaataaaattttcattgagaacaatatatgctacagtactaggactcatattgggaatcataatacaagcttttgctggttttcctaatgataccactcaagtcacttggctacaagaagtaagcaagtggtatagcctatttggttctggatttatggacttattaaaaatgttagtagtacctttagttttcttatccattataaaagtaattataaatatgaaagataacaatcttggaactctgacatttaaatctttaggtatgcttcttgctactactgctatagctgcaattgttggaattatcgttgcaaatataatgaagttaggtgtaggagctaatatgcctactttagttgaaaatcaagaacttaaagaaataaactctcttgtggatactttaagaggattactaccatctaatcctgtaatggctatggcaaatggaaatattgtagctacaataatatttgctacatttatagctacctcaataaagagattaagtaaaaaacactttgaaacaataaaaccatttatagattttatagaagcatcttacaaaataattgtaagtgtgtctatgactgttattaaatttatgccttatgctgtggttgctctgcttgcaaatacaataacttcacaaggtattagctcaatagtatctgttttacagtttatattagctctttatatatcagtggcaatattatttaccatacatttaatttttataactttaaatggtctaaatcccattacttatataagaaattcaactgaagctttacttctggcatttacttcacgttctagtttaggaacattgcctgtaacgatagaaagtctagtacaaaatcacggagttgatgagggtgtatcaagctttacagcaagtttaggtgcaaatatgggtatgaatggttgtgcaggtatatatcctgctttaatggctgtaacacttgccaatatggctggagtaaacatggatatgagcctttatgttatgttgttaattgttataacaattagttcgtttggaatagctggtcttccaggaactgctacaatggccgtttcagttgttatctctggagttggtcttggttcttattttccattagttggtggtatacttgcaatagaccctatactagatatgggacgtaccatgataaatgttaatggtgctatggtatcatcaattactgtaggaaaatcacttggaaaaatagataaagaagtatttggtaaaaaaaacatttcttagagtaacacttaagataaatggctaacttttaactagttagccatttattttttattttataagaaaatttctttagaaatttacttacaaaacggaaaaaattcttttgtaagattttggggatatacagatataaaaacaaagtcatagtcatgggattttgcatattctagtatatctccatcataatatctagggtctatcatatctatagatgaacaaacagaggaaaaaaatgctgctgttggtacaattagagaatctttaacaaacagcacttttaatccatctggattttctatattttttattttaactaatggtctattccccaataaatatgtaaaatacttatctgattgaccatccattaaatcaaggtctgcattaaaaggatatgataatattaaactctcttcaaaccttccttttaattcaaatttttgagatttagaatctgtataataagtataattagtcttaaatttaggataaattaatgtaaaatcatctataccaccatataagataccagtctttcttcccatagaaccaagaaatgacttaggatatacaattgagttataattttctttatctctatagtaatgattttcatctaaattcatattgtattttttattaagttgctcaactaattctccaaatgcccaaaaagaagtttctactttccagtgatggtctgttttaaaaaataaatcatcttttggaataccactctttaaaatattttctctaaaatcaatatagtccacattatacttttttagttgatttaaaaaattatctgctgtctcattgctataagaataaggtattccttttggaaattttgtcactccttttatatacttatctggagtcattaagtaaactaatttagtgttttgcttttccatttcctcagaaaattttcttaccctatctgctatcacaccaactggatttggagctttagcaaaatatgtataatgcatctttccagaagtatcttttacaacactaaattttgaaaactcatttttacccattaacttttgtaagtagccataagtttcaatgaacgtatttttatatattactttgtcatttactgtgttatcaatagatgatattgtatcttttaaactacttttttcagcaactgaattttttatctcctgtatcatatcttttccagaataacaaatattaaagatagagaaagcgaataaaataattaagaacataattgcagttattaatcttactttaaaaaatctattcatacttttcctcccaactaaaaattaaaataaataaatggattatagcttccagttactaaatatgtcacagaaataaagaacaataaaatagctgagattggataaaatacgttaaatatcatactatatttagcttgttcaacaacaaacttattgattttctttgcaataggtacactaaaaataaatgcaaatataaagaaaacccagtattcttttaaaaacatatatgtataatcactccatataactccattgcctccaagcatagctttgaaataattatatgcttcttttaaattaggtgacctaaacaatacccacccaaagttaactactaataacgcataaatatgttttataaaattgtgattttcaatcttttcaaacattataaatcgctctataatcaagaaaacaaagtttaaaatcccccaaattacaaatgtccattctgctccatgccatattccagtaaataaccacactataaacatatttctaatcataatatctttatttgctactctagaacctccaagcggaaagtatatatagctcttaaaccacattcccaaagaaatgtgccatcttctccaaaactcactaattgattttgatatatatggataattaaagttctcttcaaatttaaaaccaaacataagacctaaacctatagccatatctgaataagcagaaaaatcaaagaatatttgcatagtataggctattgaaccaagccatgcaagtgatgcagctatttctccttgactattcatagtgtaaatatagtctgctactatagccatgttatttgaaattaatacttttttgcctagacctgttataaacctgcaagtcccaatagaaaatttattccaagtttcttttctattgagaatttgttctgccacactctcatatctaactataggacctgctattaattgtgggaaaaatgctatatacagtcccacataaaaaggattcttttggacttctccatgtctacgatatacatctataacataagacattccctgaaatgtaaaaaatgaaattcctataggtaaaacaatactaggtatagttagttcagtattaataagttcactaatatttcttagcgcaaaagctagatatttaaatataaataaaacacctatattatatacacacatcaaaactaaaaaaacttttacttttattttactttccctatatctatctactagtaaaccaaatatatagttcattattatggaaactatcatgataacaacaaattttggctctccccaagcataaaaaaataaactaacagcaagcaatatcatgttctgtatcgttcggttaaacctaaatacataatataaaaccaaagttataggtaaaaaataaaataaaaaaattaaacttgaaaataacacaatctaacctcctctctttacttagtttttgaacattttttccaatataaatatattccaaagcatattattactagagatacaaataaaattcgaacaaacgttatgatgttattcataaagtttatttttttcatatattgtactgttggtgattgctcaggagataccaatgtatatggaacaccatccttatcttttttattaatactccaagattcagttaatgctattttccttccaattttaaacttatcatcaacattaacttgtaaaataatttgtccaggttcggctttattacttaatgttaatttaccattttgagatatgctcacattatcttgttttcccataagagaatacttaattttagaatcacgtttaagacctaatacctcatactgacttatactttgacccaatactggtatttgtacttcttcattgccagttattttaatattatgtaaaaaacttaatttctcttcagacaataaagatatcttttttataataacaatattatgttcttcatcagatggaataaatgtaattccccaactaacaatgtttgaaagcatacttgagtccagcacaacattacttttctcatttataaggctattaaagttcacataaattttgccttcaaattcacctggtacttctatgcatccttcttttattttatctgaatatattatatttttatcttccaaaaatatttcactaccttcttttaacctaaattcaagcatattcttactttgtatacttaaatttattttctgggaacttttatttttattttgaatttcaatataaaaattattatacatactccaattttcttttatattttggtaaatatataaataacgttccttatcacttttagaactatctgtttctatttttacacctgtatcttcatatgtaatcctagaacttaaatcagtctctatctttttaaaggataaatctaaaattttatcacttgtcgctgaacttataaaagtagtatttataaaaaaaataaacaccaaaataagatattttgcagaacaaaaaaacacttttaaagtcttcatttcatctctcctaaatatattccatgggttcaaactcatctatacttttttccttcttttcactaggatttgaaacaggaattgtcttattttgtaatatccaatccatcatttcatctcttaaaaagaaattttgcattatgctgtcaatgttatttactttatataagagacctctttcatcgattttaccctcacataaatcacattctaacacaatattttcattaatttccaatgctatttctttaggataaatatttttattctcaaaatttaataatacatattgataattaaaatttactattcttaatttacctgtattttttatatccatctgaaaattcatattgattcttggacttcttcgtgataatgttctaatcttttcaatacgtttttttacattaatttgcaaatcatcaaagaaacctagttgattagatattgtcatcggtaaagtaggtattctatcgtgaacaatacacatccaattatctatttcactatcttcaatatgtgtaatataagctgcatatttccactttgaatttacttccacaacattaacaatctttgctttcatattagctatatacatttcatttcctgatttttctctaaactctacctcgaactcttcttctggggaaatatattctggattttctagcaaaaatgcaaacccattttctgatatatcaatcgtttttgaagaaagaacataagagttttgctttaacttaaaatcaatttcagcaatataacgctcagactttcttaactgttgtctccctgatataaataatgtagccataacaaggttaaaaaggtttccaatcaaccaaaataatacaactgaatatgtcattgaactcattttaaatattgctacaaacatttttaaaattcctatgatagataagaccatgtaaataaaataaggtattccctgtaaaaacttatacattctattttcttctaatttattcttatttgttactgaaaatttatttttagatattgcaaacgtttcaagtattactgctggcattaaagactgaaacattatagtttcatatatattggtccatctagtatttcttatattttgagaaaatattttaagagataaactacttaaaatatacattggcaaccaaaataccaatacttgaagtaatgtacattttactacaatcacattaaacacagaaaataaaataggtgccattatatatacaaagcgttttatacttgcataccaataagtaattgaagaaatataacttattttctgccaaaaacctaaacctctcctaaacaaaatatttagacgtctaccagtttgtatacatccacgtgcccatctttcacgttgcttaataagactttttaaatctgtaggagataaacctgatgcatgtacttctggaatagcataacatctataccccttactttgaattaagatacctgttgcaaaatcttctgtaatagaataagtataaaatccatcaacttcttcaagtgcttcccttgaaataactgtattactaccaccataaattacagaatttgtcctatttctagccaattgaatatctctgtaaaaataatcttgctcatttggaatccttccctcagagtgcagattaaattggaacaagtctggattataaaaactctgtggagtttgcacaaaaccaaccttttcatactcctctttttctccatcttttttagcttgctcatttttcaaaaagtatggtactgtagcaattaaaaagtcatgcattggtatcatatctgcatcaaacgtagcaatcaaaggagagtttgtatgttgcattgcattatttaaattcccagcttttgctccttctctttcagttctagttatgtaatttacacccattttttctgctagaatacgcatttcttcacgatttccatcatcacatatgtatatatgtacctttttcttatctggatactgcatatgaatacatccatttacagtttttctcaccaaatcaacagactcattatatgttgcaatgaatacatctacatgtggataaagttcttcacttatgactggtttttcaggatactcaatatttgacataccataataatgtacaaacatttccatcatacccattatctctacaaaaagaagtattatagcacagattaaggcaaacatcccttcttctttaggtactgtgtaaaaaattctccacaatatatatacgatattagtaataatagttaaagttataagtatcttttttgaatttttcttcataaaatcacctcttttctattaatgcacttaatatgtctctatcccaagtcccttcaatttgattgtatataccaaatccagaagcaagctcccaataagcccatgaaaagtttcgtttttcagcttcttctcttacagcttttatccaagctcttcttgaagcttctggtgcttcttttgttactccaaattcacccaagaatatttttaccttatttttatttgcccaattttctacaatatcaaaccttttttttaaataatccatttgttcatttgttccttcccaagtaatattgctcaagtgctcaaatccattatgataaatgtttccttgaaatgcaaaatcatttggttcgtaatagtgaaaagaaactactatattagaatcttttggaacatttaattcattcaaataatcaatttgatagaaattatatggtcccactataatagttcttttagggttagtttttctaattatctttattgcttcttcaatgtattcgtttagtaattgtgaagataaattttctttaggttcatttaataattcaaataccaattttttatcatatttttgatacctattagctatctgttgccatatttttaaaaactcttctttatgaactcttggttctttcataatttcttcaaaatgatgtaaatccaacacaactattaagtctttatccaatgcataatctacatatttatcaatctttttaaaaaattcttcatcaattttaaaattatcagaatctgacgtataatcagaaaaccttactggtatacgtactgtgtcaaaacctgcatcttttatatcatcaaaaaacttatttgacatttttacatcccacggaaaatccttaggtgattctagtgcattacctatatttatccctcgttgcatcttaactgtatcactgttacctcttattgcaagataaaatccaataaaagctatacttaaaaaaaacattataataatacctattctttttatattaatccccccaaacaatgttatcttccatataatattattcaatccctattatagcaaattaaagtacatcatgttacatataattattgtcatttataaactttatagcgtttatagttagttttaaaacattgaatacaactaaaaaactaaagggctatcttagaatataagtaatcctatttttcattgttgaaacaatgaaactatattgatttcatacaaaaagagtgcctcatgaactaaaaagttcattttgagacactcttatatttttttatactctgtctaacaactctaatacatattttttaactttatcatatccccaattatcaagtgaatatcctaattctatgtcaccaaaacctttaatttcagcattttcttttttatttaataattcttgcataagctcaacttctatatactctctgcccttttctttttctaacattgtaaataactcaaagtcctgtattccaaatcttaaattctccattctgacacttctaactggctttaaatcttttccaggataaacaaagaacatatctccagctttccaaatagggaatttgtaacttgaatctttccaagggtcttctgtccataaattatagtcccatcttaaaaatccatcaagaccaaagtaataagtataccatcctattattctattttctacaaaaggagaacttaaaaaactatttggtttctctggaaaacagcatacaaaccaagtcaatatcccacccttgtcattgatttttttcttaagattttctatatctttataattttgtatagtaagttttaaatttattgacatatcatcaatttcatctttagctctatctaaaaagttttggtcgtgagttgctgatttatatttaacttgatgagtacctacagtagaatttataaattctatacactctttgactacttctggattatttggttcatcagctataatccttactctatcccataatccacactctattaaatgatttaatactaatcctatatattcttttaaatcatttgtattgtttataaatttaaatactttatcattttcatcaaaatatcttactcttatagggtccttataaccttctacaggatttccaaactcaccagcacaccaattacctaatagaccaaataaatctatctccttagacattttatacttatcagctatgcttatatacctatccatactctcaaagttacatttaatctttccatccaatccttttgatacacttaccatgttatattcatataggtttgatggatttttataaactttataacaactttgccctgcccatggataatctgaaactataactgttgcaactttttctcctaaagatgctaattcttttaaatagttatcgactatttcaaaatgtatatcagaccataactcaactttatacattctagctaaacaacttggatgttgccataaatctaaaaagaacttgcttttatctaaaggctttagcacgacatttcttacttttacaggaacatcaattgtacaaactttttcttcatcttcatatccaaagcttttaaatatatcaatacctatattaaggttattttcttcaaaatcttctggtacttgaccttcaatccaaaatgtttgaggcaaatattgctctactaacacatctttatcccttaaaatagcatcattcacaaatgcctttgtatcatcttgaacatatcctaatatatttatactaaaattattttctaaactattaggcacatttaatgctaatcttactctattttccagtcctttccatgatatagtactgcttttatcaattgtacaattaaattcttctgttgcttttagcataatttgaaatgcaaatttttcacctttagctactacaatatccaaatccttctctttccaagtttcagcttctataactgagtatttattgtgtttgaatgtgcaatctttcagtacatatgaaatttccatagtttaaattcctccatatttatataagtttcttttatgttattaaattagactatttaaccttttataccagacaaagacacaccttcaacaaatttactttgtaaaatcaaatagaaaataaatggaggtaaaaatgttattgtagcccctgccatcatctgtccataattagttatctggaatgtcttaagagtagataatccaactgttaatgttctcattgcatctttagttgtagctataagaggccacataaactcgttccatgctcccataaaagtaaatattgctagtgtaattaatgctggtttgattaaaggcaatactatttgtattaaaattctaaaatccgagcaaccatctatctttgctgattctaataactcttttggtactcctaaaatagcttgtctcattataaatacgccaaatgcagttggtattggcataataagtgcaagataactatttatccatcctaagtgtttcattattatatatagtggtatcattgtaacttgggaaggtataattaaagtcattatcataaataaaaataacttatcactacctttaaaatccatcttcgcaaaagaatatcctgctaatgtactaaatactaaatttaataatacacctgaaaaagatactattgctgtattaaaaaaatattgtgcaaatccttttttagtaaagatatctatatagttttgaagagttactgttgaaaaagatatatccaaactatatgagttatatgttatcttcaatgatattatcaacatgtatataaaaggtaccaaacttgcacacgctataaataaaagtaaaccatcacttaataatcttcttgctgttttcatattatacctacctttctaaaaatctgaattgtctcgttttacaagcttattttgtaaaatcgaaactactgctattaacaaaaataatacgtttgctacagtcattgcatatccagaattaaagtttttaaagtttaagttaaatgcatgcataactatactcatagtagatatacctggacctccacctgtcacagtataaattaagtcaaatacttgtaatgaccatatcgaccctaaaaatacaaccattattgtagttggtttcaataaaggtacagttatttttataaattcttgaagttttgtagccccatcaaccttcgctacttcatagcagtgttttggtaaattcattatagctgaaatataaattaccatgaaataccctatatttttccacatagatataaacataagtgtaggtaatgctgtcttactatctcctaaaagtttagatgattctattccaaaggcacctaatacctgatatataatagaaccttctccattcaataaagccctccataccatacctatcaaaaccatagatgataatactggtataaatatagcacctttagcaaatgaagctattttactatttccttttcctgtaatccaaactgccaaaatcaatgataatatagtttggcaaggtactacaacaacagtaaatttaatagtatttataatagatacttttaatgtttcatctgtaaataattttttataattttctaaacctataaaagtggctggactaataatattatactttgtaaaactaaagtatattgacattattattggtatcacataaaacgccactaaaattattcccaatggcaatatatacatatatggtttaatatttaattttgttttttttctttttgaattttcttcaaactctctaactaagttttccattttatcctctccaatataaatattagcattgtatttataaatacaatgctaattttaatctgtaaagtcctttacaacatattacagctttaaacttttattgtgctaataaatcatttgaatattttgcagcatcatctaatgcttgttttggagttttatctcctgaaatcatagtttgaagttctttccataaatattcatatatttcaactccatgaggtcctactactaatggtctatatacatttttgtcattttccaccatttctttgaatctttcatcaccttgatatggttcaccttttgttattggtgctcttggtattgctttatgaaattctgtcattgattcaacacttaacatatgttgtattaacttgtatgcaagttctttatttttagcagatgacattaaagataaatggtctactgctccaaaagttgctgctttcttatcttctagtccagttacaaacccccaatttaaatccgggaatgattcatcaaatacacttgttgcagcagaagataacattattgtaaatgctgctttccctggtccaaatacgctttctatcatttcattactatctttagataaagaatcttcaggcacatatgcttgtaattcttttaagaaattagctgcttctaaaccactcttatcattaaatttaaccgattttaaatcatcattaaaaatatctccaccagcttgccataaataaggataccagttccagtttaagttaccaaaagttttagctccccatccctgagctaatccccattggtctatctttccatcaccatcagtatcttgtgttgcttttttacaaattcttttaaaatcttcccatgtcttaggaggtttctctcctaatttctctaaaatatccttgttatagtataatacccctggatttgctgcttggaatggcataccatacattccacccatcatttcagatgtttttatataaatagattgctctttatcctctttagttgcatagttagtcaaatcttctactgctccactttctataaactgtggatacatttctgcatacatatatcctacatctggaccttcgccagcacttatagctgttgcaaatttttcagaataattatcccaaggaattatctgtaaatctacttcacagttatttttttcctcaaatttatctaaaatagggtcccaaacttccttcatattattttctactggtggcatccaaagaactagtttttctttttcgccatccttttttgaatcttttccatttccacttgaacaccctgttataagtgttgtagtcataattgctaccatagctagtgaacataatttttttaacatacccacttttattccctccattttattttcttttttcatttttattttcttttttcattataattctacacattttcactccatttaaaatattatcaaagcatgtatttattgtctaatcagttttttctatgtacttttttttaatatagtttttttctatgacaacgtttctaatatttataattgataccttccaatttattttctccaatttaaaatttaattacgcatctttttaatctacaataataaaaagctgtagatttttacctacagcttttaaatgatagcatttattatatattattaatattctttgttgataaacttcaaagttcattaacatatttttttaaccttaatattcataatgaattacacttttatattcatcaaaaatcttcttatttaactcatctccaccatcaatattggcactatagaaaatcggaggattctttagccctttattaactaattcctgagtagcttgagctataatagagttcatcacagtagttgctattacagtagaagttggactaactttttggtttaatccatctatctctacacaggcatctcccttttgaccatgattatctatcactaaatcgcatacttcataaagtttttttcctgaagaatgtcttgaagatacactttttgagtaacttaaattagttatacatattactattgccttattttccttagctttcatagcaaactctatacttactggatttctaccagatactgaatgaactataactacatctccttttttaattggagttttatcagctagagctgtaccatatccttctaatctttccatcttacttgtgtgagttataggcgctgtatctaacattagagattttgcaaatactggatttataagaacacagccacctgctctatagaataattcttctgttaatattcctgcatgtgaagctccaaatgaaaatatagcatttttactttctattgcttcaacaaggatttgtactgctttttccatattgactttttcttcgttttctattatatcaattaatcttcttatctcatctatgtatttaaatttcatatctataatattcctccaaatagtgaacctataaacttactaattataccaaataatgaaaggtcgttacctccaaatattagtatccaattttgaatagttcctgagtaaattacagcagatattcctactaaaactaccataaatattgcagctatagctgtacctattatagctccacgtataccaccttgtgattctcctattactgctgctgctccacactcaaagaatgaagttataacaagtggtataagtagcaaattaaatacattaaagtagttacatattaaaatcatagctgtagatgttagcatagcaactaagaatcctattaatacagcatttggtttataattaaataatattggacagtcaaaagcaggtagtgcatttggcacaactttttcagatataccttgaaatgctggcattatttgatttattagcattcttaccccatgaagcattattataagacctgctccaaaagaaagaccttgctttattgcatacgttccaataaactcattactatctttaaacgcacctggtattactatcccaacaactataaacattaaaaacactgccattccaccacttatagatatttctctaaaaaatgataaactttgaggtatgtttatatcttctgtagatttttctttatttcctactaatttagcaacaaatcctgatataagtgctaaacaaccagatggatgacctaatgtaaaagaatcatctcctataacatcaaacacatattttcttaataaccaaggcattattgaccaatagagtgctgataatactgctgcaaaagctattaatactccaccatttaatccagcttcaactcctgaagctacaaatatgaatgggaaccaataaagcatgtgacctgttaagaagattgtcttaataggagtaaatcttgctatcattaggtgaatagctaaacccgcaaacattgctaaacctataattccaccataacttgcagtaaaagtaacatcacttaaaccttttgttactgcaccaccacttatactttggaaagctccattaattggtgctattgaactaactaacatacctgttccagtctccataattataattccgaaagctgcaagtagtgacccctttataacatcagatgctttctttttctgtagtacaagaccaaatgctgctattaatccaattaacatagatggattacgtaaaatattatttgaaataaaatcaagcattatattttttagtgataggtcaactgtttaagttttctaccactaaatccctcctctctttcttactatttttgaatttagtaagtttttattttattctgattaacttaaatttactttttaaaacttatactatttcttatcatttttatcacttaaaaaagtttgaacaacttctgtgacttctgctaaatccatgtactttttaactggatatacatctacattacaagttccttttaattcatttaacaattcttgacttgtgaatatacagtcacaatcagcacctctagctgaatttatatctgtattttctacttcacattctatacctaactgctttagagccttttgtattgtcatttttaataccattgatgaacctacaccaaaaccacatactgctaatatcttcatttttcattcctcctaattttgcttatttataagttctagtattgaacttttatcaccattaattattagttttacattttcttcctcgtacatcatctctgatagtgatgctaatgctctaatgtgagtagtgttatctacagcagctaataccataaatatatttactggttttcctaataaatcaacttcatcttctactattagtaaagacatagcaagcttgtttactccttctttagaacttgcatgtggtagagcaaatctatcagctaaaacaatatatggtccatatttttcaactgactttatcatattttctatatataactcttctatagagttatcttctaacaatggctttgaggctatttttattgcttctttccaatctctaacactttttattatattgaccctttctgcattaattaattcctttaacattggttgatacatctctccttcatctatcttgtgtattatgtttaataaatcagcttttagtgcttcttcattattgataactccattttttcttatagcttgtattattaattcaagattgaaatacttctcgttttcttttacacttattagtttgttcataagtaattgaacatctgatgatgttaaaagaggatttacaacaattacattgtttacattttgtatatctatagttgtaattatgtaatcgtagtatacatttacttcttttagttgcttaatggacactatacctactatttctatggttggtatgtatttatatagttgtatttccaaactctttgataccataagaccattaggacaaactagtaagactttatttcttcttaggccattatccctagaccctcttaaataccctccaaaatacgctgctataaatcctatctcttcttctcttatcccctcaaatacaggaaactcttcttcattttctataattgattttataattttataaagtgactcatgtttatacttagtctcatctaacattggatttctaataggaaacttaaatcgtattctgttgtaagaagagtggaggtgccttaaaatatttttcttaaactcatgcttactttctaattttattgctgtatttacttcaaacttatctataagtttatctacatattcttcaacaacatcttccttaacttcactatttaagctaggaagtgaacttatgtaagtgcatatataggcttgttcattttcattggcttcttcacataaaagttctttacaattactaaagtaactaatttttttagcttcatttagatatttatatgagtataatgttttcccatctcttatccttttatttagaaattccacaaacttagttagatttaataaagaataatcagtaagttttatatgtccttttgtatcgaaactacttacttccttacttatagaattaatttccagtacattttcttgaacaattatcagaaacagctctctaataacgtattcatcacctataattttgtactttcccttatactctaatcttaaccccattgtttgaaggtatttttttacatcagttattgtttgtactactgtgttttttgaaagtaacatttcatttgttagtttttctattgatattttttcgccaagtaatatcttgtttaatataaaagtttttctgtaatcactatctaaaaatttatcttcttcagttgaaattattttccttgcatcacataaattaccttcaaatataaatttgtgttttacattttttatattaccactttttcctagttgttcatttatagctagaatatcgtaataaatagttctctttgaaacattaaacctttcttgtagttcttgtgatgttacattgttatttttaataataaaatctaatatttttttagccctttccttcatactacctccttaattttattatctatattttctacatgtagtgccataccaaataattgcacatgatttagtattattttataattttgcacagtctaaccctaatctaaaagaagacagtggtaaaattattaaaaaaatttgaaaataacctatattatttatacaaataaataagttgatttcaacaaataaaagattaaactacattataatatcaaaataagatataagtaatctaaaaagcacaattatataacaaaaaattgctatattaaaagagagctatcacacatcaattggaattttttgtgtgatagctccatttttatttatttaaaatttattttttaggtctaagttcagctttatctctttttacttcttctaatatttctcttaaattatactcaacactagaaagcacatcctctgcatattcaattgacccaattcttatctcattggctattctctcagctctatcaactatatcttttgctctttggtctgcttgaacaacaggttcgctggattctacatatgcctttactacatcttcagaatttttctttaattcctctatattatcttgatattcttgttgtattctctcagcttcttttttcgcttgttcaactatatttgtagcatcttgcttagcttgacttattattttatttctttctttattaatccatactgcctgtgttacttcttctggtattaaagttcttatatcattaattattgctaaaacctcatctttatccactgtgcatttatgtgagaaagggattgtagaagcacttctaaatatctcctctaactgctcaaatagttcaatcatttctaaatctatcttcatatatcaattacccccactagtttttttctttaattcttccaaaacaatctttggaaccaaattttttatatcagcatcaaagagcaaaacctcttttattaaagatgaacttataaatgaatattttgtacaacttggtaaaattatagtctctatatctggattaagctctctattcatatgtgccatctgaagttcataatcaacatcagcaccacttctcacacctctaactaatgctccaatcccattttcctgacagtaatttattaataaaccatcaaaagtcacaacttttatattatttaaatggcttgtacttttttctataagttttactctttcatcaaagctaaatagaccctttttattaggattatttaatactcctatttgtaattcgtcaaataacttcgaagccctgcaaataatatctaaatgtccattagtaattgggtcaaaacttcctgcaaatatagcttttctaggtttattttccatattatgcctccatcttataaaaagttaatgtagtatttccatatttcttatctctagttttctccaatttacatatcttatctggaaataaatcattcgtatcatgttctacaactattattccatcttcgttcaatagattagaattatcaattttttcaatagcttctataaacatatttttataatacggagggtccataaaaattatgtcaaatttactattttgtaatttaagtttatctattgcagtcttaaaatcaaggtttaaaataatactttcactttcaactcttgccttttttacattggacttaacaatatctatgctttccttactgatatctacaaaagtacatgacttggcacccctagataagcactctattcctaaagaaccagtcccagcaaataaatccagaacttcactttccattatatatgaatttatcatattaaatagagactcttttactctatctgtagttggccttacatcttcattttttggagtatttagttttaatcctctcgcttttcctgaaattactctcaatatgacaatctcccttcagcacattattacattagtaatattttaacataatttaaaattaatttaatgaaatttctttcaatgtatctttaaatttatctataatttcttttttgagtgccatgttttctttcaattgtagattattatcttcacccaatatatatcgagcttcttgttgtgctaacttcaatatttttatatgtttaaataagtttgctactttaagttctggaagaccatgttgccttgtcccaaaaaattctccaggtcctcttatttctaaatccttctctgaaatcttaaaaccatcattggtctcttccattatagccattctttgtctacatacatctgttttagaatcataaattagtacacaatacgatttatgactacctcttccaactcgccctctaagctgatgtaattgtgcaagtccaaatctttctgcattttctattatcattaatgttgcatttgggacattgacaccaacttctataactgttgttgaaactaaaatatctatttctttatttttaaaacgttccattacttcgtctttttcactcgatttcattttaccatgaagcaatccaagccttaaatcgtggaaatattcagctcttaattcctctacaagttcaactgctgatttagcttctatagcttcactttcttctaccaaaggacatacaatgtacacttgtcttcctgattcaacctctcttcttacaaggttattatatgctctatctcgcttacttttttcaatagcaattgtttctattggctgtcttcctggaggaagttcatctataatagaaatatctaaatctccatagagtataagtgctaaagttcttggtattggtgttgctgtcattactaatatatcaggatttgctcctttcaatgaaagtttgctcctttgcataacaccaaatctatgctgttcatctgttataactaaaccaatattattaaattcaaccttatcttcaattagtgcatgtgtacctattaatatatcaatctcattattccttatttgttccaatactgtatccttttgtttttttgtaagactacctattaatagacctacatttattccaaaatcttttagagactcagtaagtgaaatgtaatgttgccctgctaatatctctgtaggtgccatcaaagcgccctgataaccatttaaaacacaatttgcaagtgctaagagagctactactgttttaccactccctacatcaccttgtaccaatctattcattattttctctaaattcatatcttgtataatttcatctaatgccctgttttgagctttagtcagtttaaatggtaaagcacttattattttttttaagtctttacttgtttcaaactttattccatcttctttatttctgccacttttaaatacaaacaaccctagttgtagtataagtaattcttcaaatacaattctatataaagctatttttaatgattccttactacttggtgaatgtatgtttctaactgcaaaatctatactacatagcctatatttttctataattctttgtggcatatattcttgtataattaattctttatcttcaagtactgttctaattatactcataatttctttatttgtaacaccgtatgtaagctggtacacaggcataaatctacatgtattcttaggtgaattagtaagatattctaattcacatgatgtaagttctaagttattaaattttttcttaaccttcccaaaaactaatattgaatctcctggacgaaaagtattttttatataacttttattaaaaaacactaatttagccgagcctgtctcatcttttacatcaatctttgttaaagtcataccttcttttgggctaaatgtatttatacttgatattactgcttttatcgtaactttctcaccatcttctaattgtgctattttctttagattatttctatcttcaaattgtcttggaaaataatacaataggtcttttagtgtaaatatacccagtttatttaatttatctgcttttttaggtcctattcccttaacatattgaacatctttatataaatccaacaaatatatcacctactacacaaaaatcctgtacaaccaattttataaaagctacttggtcatacaggttcttataatcattattcaactgaaattaagtaataataaagaggttgtcctccataatataactctacatctacatcttcaaacttttcttctaaagaagtacgtagttcatttgcttgagattctgtaacatcttcaccaaagaataatgttattatagcagtatcttcatcaaccaacttttcaataaggtttgatgttacttcatccacataatctcctgctgataataaatttccttctgcaattccaattatattaccttctttaacatcaatttcattcatcactgtatccctaacagcaaaagttacttgacctgatttaactgagtttaaagcattcatcatagcttctttattttcatcttcgcttaattctccattaaaagttactaatgcagcaaatccttgaggcgtattttttgtaggtataactattatatttttatcactcaattcttttgcctgattagcagccattattatattgctgttatttgggaaaataaatatatttttagcatttatatgctttatagcattcataaaatcttcagtacttggattcatagtttgaccaccttctattatatggtcaactccgaaatctttaaatatatttgccaaaccttcacccatagaagtagctataaacccaaactctttctcttcttctaaaggttcactatcattttctttcttttcttctacatccagtaatgtattttcatgttgtaacttcatattttctatttttatagttaataattgaccgtactttagagcttcttgaagtacatttcctgggtcattagtgtgtacatgtacctttatgactccatcatctccaactactgctagactatcaccataagccatcattatgtctcttattttagtatcttctaccttagaactttctaaaataaattctgtacaatagcaatattttatatcatctgtgctagtagtactctttgcaaaatccatacttgttgaaatattagtatctaggtcaacattttttatttctatgttatcgccttttatagaagctaacattccttcatatataagtacaagaccctttccaccagagtcaactacaccagcttcttttagattctttagaaggtctggagttctttctaatgaagaatttgattccttcacaagcatacttaaaaactttactacatctttctcttttttcgcagtttttattgcaaactctccactttctctaactacagtaagtatagttccttcaattggttttattacagctttatatgctgtgtctgaaccatttttaaaagcttttgctaaatcttctgttgataatttactttttccttctatagatttagctatacctctgattatttgtgaaagtataactcctgagtttcctctagctcccattaaagaacctttagataatgcttttccgatatctgatatattatcattttcaacttttgctaattcttttaaggcataagatattgttaatgacatattagttcctgtatctccatctggtacagggaatacatttaacttgtcaactaactctttattgttttggagattgtttgcacctgaaataaacatctcccttaaccttttaccatctatatattgaatcatttgtttcctcctatgaaattacttaactcttattccttgtacattaatatcaattctagtaactcttacgccagtcattttttcaactacatactttactctatctattatattattggcaacagtagatatatttgtaccatattgtattataacataaagttcgattgctatggcatcttcttctacttcctcaactcttacacctttagttgcgttctcgccttttaatagctctactattcctttagacttatatgctaaacctactaagccataactttccattgcagctctatatacgacttgagctattacttgattatctatttctatatttccatattgattcgttacctttgcactcatggttgacccccttaagcttatttttattaaaaacatttcttaatttattttttactatttttacttatttattatataaaattataatcatatcatactataaatatggtataatttaaacctagaaaagtttttggataaaatttcttctatagtatatatattcaaagaaaaataataattattttccaaatatatttactttatataaaattatatatataattttatatgataataagaaattcttcaatatgtgtaaggcaaatatatatttctattgcaaatttttgttatttatgataatataaatatgtttttagtctttaaatagttatcattttaaggaggtgtgcgtagatggcaaaagtatgtagcgtatgtgataaaggtaaggtttctggaaaccaagtatcacactcaaataaacataataaaagaacatggtcagctaacttaagaagcgtaagagcgattatagatggagctcctaagagagtaaaagtttgtactagatgtttacgttctggtaaaattgaaagagcttagtaaccacgtttaaaagcctacttccgtaagtaggctttttaatttaatcatttttactctttctcataaattttaggattatacttgaaatccattttggtaattttattgttactactttcatcaatactcaccccacactttatagttaaaactattttaacaaaaaaataataatgctccacatccaataagtattaatgcggtaagtgctgaccaaatccagccaggaagcaacattgacagaattacagccattcctgttgctagacaaagtattcctagcaataccttagacttgttatttctcatggaacacctccacatagaacctgtatctataaatattttcatattcaagtttatgcgacagttttccattttagaccaataaacacattatgtaattttaatttttcatactagaattattactgaactccgatatagattctacaatatccaaaattcctttttttctacttaacctttcaggtccactatataaaaccactggtataactttaggaagtttaaaatttttatcttctatttcttcaaggctttttttcataataaaacttttccaaatttgttctctatacgatttcaatcttgggacaatttcagtatccatttctgtttgaaattctaacactatataatgtgatactttgccacttttagaaaataccttataaattatatcaacttcttttcctttatattcacatataaaagatgtttctaactctatatttttaagagttaattcttttgctattgagacacttgtaaaattttgaatcaaacttaaaaaactttctttatctgaatacattcttctgtactcttctcgtttttcattgcttctttttaaattcatacagttcctcctaggctatagaccttctatattttagtaaagatagtctataaattttattttttaattttcattagtgagtattgacagttgtgtgtaaaatatccagtaaagatatttttttatatttttattaaaagatataaatttttatattttaatatattgacatttacgttgcgtaaaagtgtatatttaatttataggaggtattacttatggaatatacagttcaaaaattaagtaaactagctggtataagtactagaacacttagatattatgatgaaataggtcttcttaagccacttaaaataaattcttcaggttatcgtatatatggtcaaaatgaagttaataaacttcaacaaatacttttttatagagaattaggaattaacttagaaaatataaaaaacattataaattcaccaaacttcgatagtttaagtgcgttaaaagaacaccataataaattactagccaaaagaaagcaaattgatttactaatagaaaatgtaactaaaactatagctctgaaggagggaaaatacactatgacagatatagaaaaatttgaaggttttaaagaaaagatgattgatgaaaatgaaaaaaattatggaactgaaattagagagaaatatggtaaagatattatagatacatcaaataaaaagcttaaaaatatgtctaagcaagattatgaaaattggcaaaacctaaatatcgaaataattagtaaacttaaaaaagcttttaaaactggtgatgcctctagtgaactggctcaggaagttgcaaaattacatcataaatggttgagttacacttggaacacatactctaaagaagctcattcctctctagcacagatgtatgtatatgatgaacgttttacatcatattatgatagagaacaacctggattagctaagtttttaagggatgctatagtaatatatacaagagataaataatataaaataataaaggtggtgtctcaaaatgaactttttagttcatgagacactcttttttgtatgaaatcaaatatatttttatcattttatcaatgaaaaacaagtttctctctctattttgagacagaatctttattgtataataattataatcaatacaaaataataacaaattatacaaaacttacttatactatttatgctaaaaacaaaaaatattttattaaagtttttaaaacttatgtaatataaaaatctatactatagacttgattatggaaagaaaattatcaaaatcattacaattagatatactatctctaatatcattgtcatgaattatctttaaaaggatatcataaatggagtttatttttatataatcatctttatttatagctaacatcatgattaatttaacagtagaatcttcactccaatatattggttcattcaatatggaaatacaaatcttagttcttatagagcttaattccataggatgaggtatagctaaaaaatcatctatattggtagaagataaactttctctgtaaaatacagattcagcaaatgatggaaatacaatttcactttgagttaatttgttgcacatcaactttataagctcatctttatctttgattttaggattaacaataaataaatttttatcaaagaaattgtccaaaagattactataaatatgggaattattagtgattgacttagatatattctctatatctttttttaatagttttaaatccactaatacaataggaatactatcatgatttaaaggaattgtcgatattattatatctacatctgacaattcactagctaaaaattgattaaatgatagacattgaagtatatttattttatcatgaaaaactttgtttaattgaacctctaataacctacttgaaccataccctgaaccacatactaatactacgtttttacacttaatattattttgaaaaaatctctctattccagcacctatatgcagggatacatatccaatttcatcttctgttaaagagtaaatactatttttaaaaactttttctatagcatttaaagttatttcaaatgctaaaggataattactctttattgtatttataaggggattcaccttatttaaattataagatttagaattgagaattgatttaaagtgcagtactaaatcatcaaataatacactatcatttctaaggtcaaaagtatattgattgttgattacttctaaaatttcttcaacatactctataattttagtatccaccctattggaaacgttatccaaaagagaacttttagttataaaatgattatatagataaactctgtctgcctttgaaataattatagtatatttactctcaatataattaaatatattttcaacagttgtattcgattgaaaatctgttaaaacaacatctaaaacattatctaagcagtaaccatcaagtattctacttatagtaatagctaaatggataataaagttttttagattaaaatctagaaaatttatattaaatttattaatttcacttaacactaccctttgaagctctattaaatctacattattaaataattctatttctctatctgtaattccaattatatagttttcaaaattcctatttatcatattattagaaatacatcttcgaatatctatttccttcccttcaactttaactccataatatggcttagaaactaatattaaattatactttgacaaaataggctttattctttttatgtcatttagtattgtaaatttactcacatacaagctattagctaaatcttctagttttatatatgtattgttatagagaatatattttaaaatatattgatttctttctataggagaatctggtatttcacttgaatccataatatcatcagatattaatgctagatactgttggtataatgctaaattaagaatatctatataatatccttctcctttttttattttaataatagcaccatttttctctaaagttccatttatagaagtaatatcatttcttatagttctctcactcacttttaaatgattacttaaagttttacaagtaattttatcatcactttcatttaataatttaaacaacgtgagcaatctcttgtgcataaatatccccccttatagaatttcttctaaattatactatttacactcatataatacaattactctaataaaattgtattataataatttctttccacttctatatggaaattagttattatcataatataaatttccatgtcgaagtggaaattagttatatttaatttaattaggataatgattacaatataaatataagttaagacattacgaatggagtggaaaaatatatggtactacaagaaaaatatatatttatagataaagacttaaaaagcaaagaagaagtattaaattttattgcagatagtgcttatatactaggtattgcaactaataaagaggctcttttaaaagaccttctaaaaagagaaaatgaatttccaacaggaataaaagatggatttgcgatacctcatacaaaaagtgtaaatgtaaaggaagcttccatactctatattaaaacaactaacgagttagagtggaaaactttagatgatagtaaggttagatatgtatttagtttgttagccccacataaaaatgaaggaaatatacatttaaaaactctatctaaattagccacatgtttaatggaggatgattttacaagtgaagttaaaaatgctagtgatgcaagtcatttagtaaaatatataactaataaaatgaaggaggaataattatgaaaatagtagcaataacatcatgtatagcaggattagcacacacacctatggcagcaaaagctttagaacaagctgcatcaaaaatgggtcatgaaatcaaagtagaacaacaaggtgctatgggacgagtaaatactataacaaaagaagaagcacaagatgcggactttatacttatagcatctgaccaaactatatctggaatggaaagatttgatggtaaaaaagtgataaaagtcaaaataggtatagcgttaaaaaaaccagaagctgtcttaacaaagtgtatagaagctatttcttaataaaaaaatctcactctaatatagaatgagaaaaataaaaaattaaaaaattgtctaatgtaattataacatattatcaaaaaatataacaaacttatataggaggattaaaaatgagtaaaaaaaataaatctcttttaagtgaacttaagggacacttaatgacaggtatctcatatatgttgccacttgtaataggctcatctttagttgtagctatcccaaagcttacagctttagcaatgggtataacaagtttagatgcttataaaaatgtatctggtttttatcatattctttacttaatggaacaagttggttggactggcataggtctattaaatacggtattagcaggatttatagcattttcaataggtgagaaaccagctatgggtgcaggttttattggtgggctcatagcaagtaatactaatgcaggattcttaggagcagtaatagcaggtttctttgctgggtatgtttgtaagtttttaaagaaaaaaattaaaatatctgggtcagcatcaggaatgatgccacttataataatgccacttataacagttggattaactggttttttaatgagtgttgtattagcaggacctttaggaaacataaatacttcattaaatgcttgggtagctgaaatgtgtcaaaatggaacaaattcggtggtattggctttaattttaggcgcaatgataggattcgatttaggtggaccagtaaataaagcagcttggatggcaggaaatgcattattgttagagggaatctatctaccagcgatattggtaaactgcgcaatagttatacctccactaggatatggtttagctacattcataagaaaatcaaaattttccaatgcattagctgaaacaggaaaaggcaatatagttatgggtataattggaataacagaaggtgcaattcctttcactttaacaaatccattaaaattagttcctgttaatatgataggatgcgctttgggtgtaggattatcagctttgttaggtgtacatgctataatgcctccagttggtggattatatggatttatatcaataggttctggatgggcttacttagtaggtgcaatatttggagctttagtaatagcaatattatcaacaactttagtagacttcaatgaagatgaaactacggaaaatacagaatttgatgaaatagagttagatataatgtaaattaaaaacttaattttagataattgagaattgagtgtactctcaattctcaattaaattttgggaggatttttatgaaaaagacaaaagtacatgtagttccacacagtcattgggatagagaatggtattttacaacatcaaggtcaaaaatatatttaatgaaagattttcaagatatattagacatattggaagaaaaagaggactttaaatactttactatggatgcacaagcttctctcttagatgattatttaaaatggagacctcaggatgaatatagaataagagatttagttcaaagaagaagattagttattggaccttggtatactcaaacagaccaattggttatatcaggagaatctataattagaaacctttactatggaatagatagatgcaatgaatttggtgaacctatgagggttggatatgtaccagattcttttgggcaatcagctcaaatgccacaaatatacagaggttttggaatagatagttcattattttggcgtggagtttctgatgatatggtagatacaacagagtttatatggaaaggttctgatggttcaaaagtattagcagttcaaataccatttggttattactatggaggtaatataccagaagatgattcagatttaaaagaatatttaaaagatataattggaaaacttaaggttaaagcttctactaataacgtatattttccaaatggatttgaccaagcaccaataagaaaaaaccttcctgatatattaaaaaaagctaatgaaatagataatgaaaatgaatacgaaataagtaatatagaaaactatatagattcagtaaaaaatgaaagaaatgaatttacagagcttaaaggtgaatttttaaatgctaaacatatgagaatacacaaatccatattctcctcaaggtcagaccttaaaataatgaataacaaattagaaaattatatcacaaatgtacttgaaccattattaacattaagttattcacttggaaatgaataccctcatctagttataaaagatatatggaaacttatgtttgaaaatgcagctcatgacagcataggttcttgtaatagtgacacagcaaatgaggatgtatacacaagatacaaacaagccagagatttgagtataaatttattagatttgcatatgagacttataagtactcaaatcaaaaataataatgaagaaataacattaacagtattcaatggattcccagaagtcagaaatgaagttgtagaatttgacacttatattccaggtcaagattttgtgataaagaataaaaatggagaaattcttaattatataataaaagaaaaagaagatattacaaattatatattaactcaaacaataagattaaacccaagtaaaaaaatatatatacccaaaactgtatatagagcaaaaattgcactttcagtaaaagatataccaccaatgggatatactcaactagtttttgaattggatactaaaaataaatgtgaaatagaaacaagtaattgcaaagaaatagaaaacaaatattacaaaataacagccaataaaaatggttcattagaaatattagataaagaatctagtaagacttataaaaaccaagctgtaattgaagacaatggagatgatggagattcatacaactattctcctccaagaaaagatatttatgtttcatctttagattctgtatcttcagtagaagtgctaaaatcaaatattcaagaagaaatgatacttaaatattcattgaccataccagcttcactggaagaaaggtctataggtaaagtttctgtgaaaatgccagtaacaatgaaaattaccttagaacctaaagaacaaataattaagtttaatgttaatataaaaaataaccaagcactatctcatagagtaagagttttatttaatacagaaatagcatctaagttttctatagcagatcaacaatttggaataatacaaagaccaacagtattagaaaaagaccttgcattatggaaaagagacaattactcatggcaagaaaaacctataactatcgaaccaatgcaaagttttgttactttagaggatggacaaagaggaatagcattaataactggttgtgtaagagaatatcaaatagttggtgataatttagatacaatagcattaacactattcaggtcatttggatatatgggaagagaaaatttactttatagaccaggaagagcttctggagaaaaaataatagcaacaccagatgcacaattacttaaagagttaaactttgactttggtctttacatatataacaataaatttgatgaagcaaatgtagctaatacagctaagagattcttaacacctatacaaatatatgaatatgctgattttttaaatggtagacttctatttgcattcaatgacgaaaaacaaatatatgaaaatgaatttagtttgatgaatgtaaataattcaaatttcacagtaagtgcaataaagaaagaagaaaaaggagatggaattgtagttagaatcttcaatggtatgaaaaatgaggatgctaagggaagtcttaacatcaataaaaatgtcaatgatgcttatagtgcaatgctcgacgaaatctatgataataatagcaagcttaaagtaaatactaaaactgtagaggtaaattctttatcacattgtaaagtacaaacaatagtaattaaataatataaaatagcttatacaagatttcaaaataaattgctagtactatgttaatagtaaacccagatattatgctatttataagctctgtaacactaaataacattttgtaaaataaaaaggtgaaccttgtatattaggattcaccttttttaaataaatcaacattctgttttaaaataacatttataagctgttttgaaataatacttacaaattattttaaaacaatacctataaatttttatttaaagaatacacataaatatttccagactcttttattctatagactttataattattaaagaagtctaatctaatttttgttaaaagtaattgtaactttaaataaatcaccatccacacttatattcatcttaccaccctgtaattctataaaactttttgctattgctaaaccaagaccagaaccttctgtgttacgtgatttatctcctcttacaaatctctccattatatcatctacactaaaatcaatctcagatgcagacatatttttaagcataatatttactttattatctgtttctaaaatatcaatatacactcttgaatttggcattgcatatttgcttatatttattataagattttcaaatactctaaatgtacgctgactatctaatggtaatattattttttcattagaaaagttattctttactattagagatgaatctgcaagtttgtcatctaattctaaaagtgtctgcttcattagagatacaatatccacatttactatattcaaataaacatctccactatttgccttgcttacttcaaacaaatcttctattagatgttgcaatctttgtgactttctgtctaatgtatcaatatacaacttacgattttcatctgttatactttcatcttttaataaatctatataagtgattatagatgttagaggtgtttttaagtcatgtgatacatttgatataagctctgttttcatcttttgactcttaacctcttcgtcaacagcttttttaaatccagtttgaatatttcctaattcgtcttttataggattaaaaaatcctaaatctttttccatatttacatctaagtttccatctgaaattttctttgtaacatctaaaagttgattatattcatatattgtctttttagagtaatctgacagtatcttaaataatactactgaatatattaatgcgagtattattccaaagaaccacatactacacattataactataatcaataaatttattcccaaaattgtaactatagttttatttggcttttcttttagatttattgttctaatttgattaataactgtttttcctgctttttttaaccatacaaaaaacattcctgtcacagtatgttttgtaaaatactctcttattccaacatttaaaatatgttttaaaagtattataaatacaaatattattgagaatattacaaaccaataagttaaattcattaaacttaccaatatgctagccattttagcacttatgtcattgtttataaggtactctacataattcccactcaaggtattacttattataacagtaggatataaatctacaagcccctgtataatagcaagagcaataaagagtatctctaacggtattcttaataatgtatcaaatcctagcaactctttagattttctatatgggaatgctaaagctacaataacaactatagctaatataatttttaaaatcattccagaaatcttataataagaattattttctacattgcttatatatgaaattataccatcatcaaaataagtatttccataaccatactctacactatcacctttacttattactttaggtacagcatatactaatgttatattttttattggagataacttatatgaaattgaatttcctcctaaacttgtatccattaaatcttctcttgctttagataacaacatttgattaataactttttgatttactccataagaatccacaatatttacttttccatctttatcaaaattcattacaacgtagaatctatagttttcctttatatctgtaatctgcttttgtctttcctcatcattcatttctgtattttttgactgattttcatcagaattttcttttgaagcatcattctttgttgtatcaagtactcctaattctttattatcattaaaaaattcaaaattgctttctttatcaactaaatagtactttaaattctttcctgacgctttaatgaaatgctcccaattttcaaagttttcattaaaatctgcattaatactatcatctgtataataagtttctgaaccatcataagtatctttttctttacttacattttttatatagttcatagtttcttcattgataaatagctttgatggttgtatcatcttaccttcttgttcttccttcatattatgatataaaacataacttcctttatatatactatctacaaagctttcctgttcaaatggattctttgctccacctttagcacctgcttgtatagtagaatattgactaatcatacctaatgatgctgataacataagtataaaaactataatagtaactatatatttatctttaaattttttcaattttgtatccaacaccccacaccacctttaaatatttaggattttttgggtcaatttctatcttttcccttatattcctcacatgtaccataactgtatctgtatttatagcattttcattccaaactctttcatatatttcatcagcagaaaaaactcttcctgcatttctcataagtaaacttagtattttaaattctataggagttgtttttatatattttccatcaatattaacttcttttgtattttcatttaattctaatccgcctattgcaaacacactatcatcactttctaccttttgctctttatttccaaccatgtttagatacttagtgtaccttctaagttgtgaattaactctagccaatagttctaatggcttaaaaggttttgttacataatcgtctgctcctatattaagccccattattttgtcaacttcttctgattttgcagatagcattattactggaaaattatagttttctctaagcctcattgtaagtgttataccatccattttaggcatcattatatcaactatagctaaatgtatttcttggttttctataaccttaagaccttctaatccattgtatcccttaaaaacattatatccttgatttaatagatatatctctatagcatctgcgatctccttttcatcttctaccaccaaaatattatatgaattcattttaatctcctttatattaatttataaattttctttacatatatgattatacaatatgatagaagtttttccatttatatatatatttatatcttttgttctggttatttgtatttaatgtccatcttagaaacctccttctagtttaaacttaatattttttcattttgttttatatacttaatattaaaattaaaaacttaagatattacatatacttttctaaagattttctaaagatttaaatatatttagaattaatatataaaaaaaagtagttcttattgtattaattaaatcaatgatttgaaatataaaattaatatcaataaaacctactttttaattttttaaatatttatttttaatttatcttgtttttaatttactttgattttaaaatgtccttgacttttattttataaatgtacatatttcttctactggttttttagatggactcttcaaattgtcctctggcactccaagagctaacattgcacctaaaaaatactctcccttttcaaaaccagtttctgcttctaaaacagcttctatctcatctgctgcatagttttgacttgtcaaccaacaagaaccatatccaagttcaattgctgatagtgtaaagttttcaattgaagcacctagactctgcatacctggatttcttataaataatttatctatagtctccttaggtgcatctataagctctaattcataatatcctgatggattatatacctttgtaaaaactaatactaaaactggagcttttaagtaaaatagtgtaaagtttttaacaaattttctaaatctattagccttatccactgatactttatccatttccacaagtatttcttgttgctttttagttatcacatctgctatcttttccattaaatcacggcgttttataacaacaaaatgccagttttgaatattcttgcctgatggtgctgcacctgctgcttttatcatttttaaaatatcttcatctgatacatcttgatttttaaactttcttacactttgtcttttaaaaatagtatcttgtaattccatttttaaatccccccataacttttttattattttaatataatttttaaactcatcttattttaatatatcatgttctaacaaatctttaaatgaatctataaaataatcatatacatctacattcccaaacccatatttggcatatataaaaggtatacctacaaacttagcactatttgcatcaccttgcgtatcaccaacatagattggatttattaatttatttctttcaattataagtttattattttctcctttatgcaaaccagtattaccaggacattcaaaatctataaaatactgttctagtttatgtgcttttaaaaaagattctatatatccagcttgacaattacttactataaataatttatattttttagatagtaatttaagagtatcttctatatcatcaaataatttagctccattttcagataaatagtcacattctttcaaagaacattcattcaataaattcattctttcttcttcacttaaatttggaaataaacgatttgctatttcctcaaaagaaagccccataagacttctaaataaatcttttgtgacacttaattctatttccttatgtttacttaaaacatcctgccagactttgcatacttcttcagttgaatcccacaatgttccatctaaatcaaaaataatactatctaccacaaaaaatcccccttatgtcaaagtttattatatatttataattatatactaaaaagcagatacaatcataaatatattttacttgattgtatctgctctacaatataaaaccaattgtcaaaatcaaattttataaatttctaactacaagtacacagccttgctctactttaatcttacaagaattactcaacataacatttgatattccaataggtacagagtatttcatataataattatcgagagggtattctaagccagtaagtgttacacccttagcatcaccttttatagctgttacagaaacagtgtcccctgggtttccatacaatgaaatttcctcattttcaactatatacatctcttctttatcagaaagtatcctagaatatataccatcttcttttaaataatataatagctttatatttgcaagagtgtggtcaatccttccccctaaagcaccaaaaaaatcaatatgatttgctttaagtgtcttagctaaaaaaagacaaagctctgtatcagtctcatcttttttagatggaaatttttcaaatttaacacctttatttttatagaagtttatcttttcttcttctactgaatctaaatctcctaatatataatctggcattatttccattttataagtgtgatttgcccctccatctgcacatattatgcagtcataacattccttaattataatatctcttgtaacttcgtaatcttcaatttcgccatttaaaacaatacagattttcattattaaatttaaactaattcttcaagagaagcattctttctaaataaattaactgtttcttgaatgtcatcacttccaaatattgcagaacctgctactattacattagctcctgcttgtacaacttcggctacgtttttagggcttataccaccatcaacttctatatcaatgtttaatccttgactatctataatagcttttaactctttaatcttatctaaaacacaaggaataaatgattgtcctccaaatccagggttaacagacattaataataccatatctaaatcaggtagtacatgtttaatcgtatctactggtgtagctggattaagtactacaccagcttttattccatgtgattttatattttgtatagttctatgtagatgaacacaagcctcctggtgaacagttattatatcacatcctgcttttacaaattcttcaatatactggtctggattttctatcataagatgagcatcaaataccatatttatattttctttctttaaacttttgactacaagtggtcctaatgtaatgtttggtacaaagtgtccatccattacatcgatatgaagatattcacatcctgcactttctacttttcttacatcttctaataattttgcaaaatctgctgataatattgatggtgctaatttaatcatttttctaatacctcctactattattttgtcttatttcatgtagcagctgtatataactatcatatctttctttagatatttctccatttgtaacagcttcttttatagcacaattaggttcattttcatgaatacactttgaaccaaacttacaatcattaaatttatcaaattctataaaataatctttaagttcaacttcctctatatcttcaagtgcaagggaactaaaacctggtgtatctgcaaccattccaccaaattccaattttaaaagttcagcgtgacgagtagtatgttttcccctttttattttatcacttaccactcctgtttgaagtttaaaattttcatctatttcatttaataagcttgattttccaactccagatggtcctgcaaacactactacattttcttttaattcttcttttactttatctatatttaacttagtaatattgcttacaggaatgactttatagccactaagttcatatatatttttaacagtttctaatgtatcattatcatctaaatctgcttttgtaaggattattacagtttctaaattttctttttctgccaaaactataaatctatctaaaagagataagtttggtttaggattttttattgcgaatactattaatgctttatctacatttgcaataggaggtcttataagttctgtatctctactgtcgatttcttctaagataccctttttttcatcttcatcaacaatgcttattttgactctatcaccaaccaaaggtgttattttctgctttctaaatatccctctagccttacattcataaataccattataagtatctacataataaaatccactaatcccctttataatttttccttctagcatcaaatgcctccctttataaaatttatataaacacatactgtttatgaatagtatatcgtgttattctttcctatttttatataataccacattttttttaaataacaaatcctccgtttggactaattacctgaccagtgataaaatttgatttgtctgatgccaagaaaatagcacaatttgctatatcttctggagttcctagcctcattagaggggtttcttccacaagagcgtctatatcttcctcattatatccagataacatgtcagtattaatgacacctggagctatgctatttactctaatatttgatggtcctacttctttagctaatgcctttgtcatacctattatacctgcttttgttatagaataatgcacttcacaagacgcacctgatataccccagattgaagatatattaattatatttccttttttttctgatatcatgtattttaaagcaacttgcgaacaataaaagcttccttttaaattaatattcatcatattatcccaatcttcatcggttatatctgtaaacaacttatcttgacttacaccagcattgtttacaagtacatccaatcctccaaattcttttatacaataatctaccatattctctacatcttctctatttgaaatatcagccttaaaaagttttacagaaaaatttttttcatttaatatagtatacaactctttagcttcattttctgacttattaaaatttactaatacattgtaaccttcttttgcaaaagctttagacatagctttaccaatccctctagctcctcctgtaattaaaacggttttcttcttcataaatacttttctccttatattataaccaattcagtattttatacaaaacaaactgccctttaaagaaaatattttctataaaaggacagctcttattttattaatatttattctgttttaccaatgtttgcgccagttcctgatgaagttcctccattatctcctgagtttgagcctcctgaactatctccattgtctcctgagtttgaacctcctgaacttcctccattatctcctgagtttgaacctcctgaacttcctccattatctcctgagtttgagcctcctgagcttcctccactatttcctgagtttgaacctcctgagttacctccattattgcctgagtttcctccactatttcctgagtttgaacttcctgaatttccaccactgttccctgagtttgaaccaggttctgttggtgtattattctctggtgttgttggttttttatctggtactgttggagtctgtgtatttgatttttctgaacctttgcttacatataggtttacctcatcaccttcctgagctcttgatgagccagcacctggactctgacttaaaactgtaccttctttatatattgagctatattcatacttaacagttcccacttttaagttattttcttcaataagttgttttgcattactcaaagtaagtcccaccacattaggaacagatgcctgacttgaacctttacttacgacaacatttatagtatcaccctttttgacatttgtacttccaccttcaggtgtctgtgatattatacaattttcatcaacttcactattatactcttcactttttacactcaggtataatccttctttttcaacagcactttgagcttcttctaatgtcatatttacaagattaggaacagtcaaagatttattgccaaaccctccagcaaataaaaacttatatgctaagaatacttgagcacacaatatcagtatcaaaacagccgcaattacttttaatcttcttctagattttgggctttcctgttttttcttctttttcttagttctcttacttggagtactcttaggtctctgattctttttagctctcattatctcttcctcttcttcttcttcttcttcatcttcttcataaaaatcatcatagtaatcttcatcatcatccaaatcagctacttcaacaggcttaaccactttttcaggagctggttttgcaagtgttggatttacaactttattaatttctttttcatcaattttcttagttgcaaaatcatcatattcttttataaaatctaaatcaatatttttttctatatactctatatcttctatcaattcttcagcagtttgatatctatctgcgctagatttttctgtaagcttttttattgtagttcttacactttgaggaatcctaactttttcttctgatgtaaagtctatatcatcattaatgtgttgaagtgctatagaaattggactatctcccctaaatggaacttttcctatcaacatttcatataaaactatacctagagaatacaggtcagcattattagttacaaatttacctttagcttgctctggtgaaaaataatgcactgaacctattatactaccaatattagtcattgttgaatttgaaacagctttggctataccaaaatcagccacttttactactcttccttcatttgatatgagaatattatgaggttttatatctctatgtataatcccctttttgtgcgctgcactaagtgccatagctatttgttttgttatatctaatgcagtatattcatctaatataccttcatcttgtataatctcttttagattcttcccatctacaaactccattacaatgtagtgaacttttccatcttcaccaacatcataaacatttactatatttggatgtgaaagacttgctactgcttctgcctctcttttaaactttgttagaaattcatcatcatctacaaattcaggtctaagtactttaagtgcaacagtcctgtttaataatctgtctttagcctcatatacaaaggccattcctccatcaccaatcttcctgatgatttcatatcgatttcctaaaattgtatctcccacaatatcaccgtcctaattatacttttatcactataaccgaaacattatctttaccagaaacatcattggccatacttatcaattcttcacttatattactagttctctcatattcataatctaatattaaatctcttatatcttcatcatcaataaacccagttaatccatctgtcgcaagaagtattatatcactttttttgatttctttcttaaaaatatctacaacaaccatatcatctgttccaattgctctagttattctatttctctgtggatgtcttcttgcctcttcttctgtaatgacatgggccatcataagttcttcaaccacggaatggtctatagttattttatcaaatttttcatctgttaacaaataacatctgctatctccaacatttgccacatataagacattattatacactatagccgtaactaatgtagttcccattccttcaaattctatatcttccatagattttttgtgcacaattgagtttacattattataagcctgttttaatatatcatctatatagtctatttttacattatcatgttgtaataagttttcctttagaaaatcaattatattttctactgctaatttactggcgacttcaccttttttatgtccacccattccatcagctatggcaaatattcctattggaccatgttctgtatctataacttctccctcacaatagtcttcattgttttttcttatttttcctatatgggaggcacaactataaaccatacgacttcctccttacaaattacttgtattttcttctcaattgaccacaagctccactaatatcagaacccatagacatcctaactgtggcaggtatattgttcttctccaaactatccctaaatttataaataaatgctttatctggcttttcgtattctctttcttcaactttatttattggaattaaatttacatgacatagcataccttttaggagcttagctaatgcctttgcttctttttctgagtcatttactccttttataagagaatattcaaatgtaacccttctatttgtcttttttatataatatctacatgcattcaatatttcttcaatagaataagcatttgctacaggcataatttttcttcgttcttcatcatatggtgaatgaagtgataaagctaaatttatagctatttctaagtctgccaactcatacattttaggtactattccacaagttgaaagagttatatgtctataccctatattaagaccatttttttcgttaattatttttaagaattgttttgtattttcaaagttatcaagtggctcaccactccccatcaatacaagatttgataccctcttaccagtatcttcttgaattttaataacttggtctaaaatttcccatggctctaagtttctaattaatccatccattgtagatgcacaaaaattacatcccatcctacaacctacttggttagaaacacagacagtaactctactatcataatccatcatcacagtttctattatatttccatcatctaataaaaacaaatatttttttgtattatctaccttagattctaactttaattctatatctatattccctatacatgaaacctcttctaatttatttctcaaactttttggtatattgttcatatcatcaaaagtttttgcacccttatatatccaagagaatatttgacttcctctaaagggcttttcatctatagttttcataaattctttaagttcatcttcagtaaaattttttaatactatctttttcttttccattctctcactaccttattctctttaattttgctatgaaaaaaccatctataccatgaatattaggatatatctttaaatatcctttatcttgattgtctaagtctacatttactgtatcaattggaacaaattcaaagttgtgattttcttcaacaaaagaagtaactatatttatattctccacatcttgaattgtacatgtactatatactaaagttccaccaactttgacatatttagatgcattttctaaaattttcttttgtatagaagtgatgtcttttaactcttcttctttcttatacttaatttctggtttacgtcttattataccaaaaccagagcaaggaacatctgctaaaacataatcaaatttacttatactattttcatcaatctcagaagcatcaaatctttctacaaacacatttttaagccccaatctatttacagtagagtttataagctttagtttatgctcaaaaatatctctagctactacttgacccgtattgttcattaaagtagctaagtgagtagatttccctccaggagcactacatacatccaaaacaaatgaaccttcttttggattaattactttccctactatcatagaacttatatcttgaattgtaaataaaccagccttaaataattcatttttttctatatttttcattttttcgactttaatagcttcttctaccataggaacttttaaacatacaatacccatttcacttaatttttcaataagttcttctctacttattttaagtgtattcgttcttatatagatactaggcttttcattatttgcttccaacaaatcttcagcaaattcttgtccaaatttatctatccagttttttataatccaagagttataggaatactttatagataagtattttacactatcttcctcagttatgtccattatagtctctttagctcttatttcatttctaagaatagcatttatgaaaccagaagattttttatcatatttcttagataattttacagtttcattaactgctgcataatctgatatactatctaaaaataaaatctgatatgttcccattcttaaaaagattttaacataagttgacattttttttacctttatttttgaaagtttattgattatataatctaaataatatttattttctattactccataaattaactctgttgcaagtcctctatccatatcacttatttctaaatttttaaaatgcttatttattgcaatatttgaataattgtcatttttttctatatcacataatactttaaatccaacttctcttgcatccatataaatttctcccttttattaaacataaaaaagggttgtttctaaacaacccactttacttttagtcatttcttctttgagctattagtaacaatctaagtaattgaagtattgaaaccaatgctgctgcaacatatgttaaagctgctgctgaaagtactcttctactttgtcttgactcactttcatctataatacctaaattcccaagttgaacgattgctctacttgaagcattaaattctacaggcaatgttattatttggaataacactgaagccgaaaacaatagtataccaatttttaaaaatggaccagccataataaatcctaaaaatattaaaaaccaagatatacttgaagcaaaattcactactggtactaaactacttcttatttgaagaggcgcataacctttagcatgttgtatggcatgaccacactcatgtgcagctactgcaacagaagttatagatgttccataatatacatcttctgacaaccttacagcctttcttcttgggtcataatggtcacttagatgccctctaaccatttctatctttacatcatacaaaccatttgaatcaagtactcttcttgctgtttgctctccagtatatcctcgacgtgtatttactcttaaatacttatttgttgttgaactcactttaaattgtgcatatatagtaagtaatatagctggaattaatacaaccattgttgggtcaaatccccaaaaaccgccatatacagggtacataaataacactctcctaaaatatatttttattatacatcctcttaatattcacttaacttaaaaacagtttaattacaaattaatatattttttcctgttaaaaagtctatagctttttcaatatccatcatgtctacattagtatttacacaaggtccattaggtcttttgttaaatacacctaaaacaggaattttcttaatatcttgtattccagatgtcaaatctctttcacatgcaacagctacaacagctttaggtttattatccattataatttttctagctagggttcctcctgtagctacaaatatttttacattagttttttcctttagcttaattaattctcctacgttgcatcttccacattctttacaattatctatatcattagtaacttttaatttacaactattctcttgaatacaatgaggtattaaaattattatatcctctggattaaaattatatttattactgtatatatattcattatttaactttatatatattcttctaatatcactttttgacataccaaatgatgatgcaatgaaagatataataggaaataatccactgacaatattaaaatttattttcattatatttgagttaacatactttcctttaattactctataagtaactgctgttgaacatagtattataagtattagtgatattattataatatttatcatcaaggagaatatttgagttaaacttattataaaaaaattaacaactcctatcaaaattcctaatattaaaatcaaaatcccaacacttgttaaatacttctttatatctgtcatacttttcacctaacccaatactaaaccagtttctatagtattcccttttatatattcaccaaccaacattctctttttattcggcatctgaatttcttcaattaaaagtacattatctatagtacttacttttatcccatctttgcttacatcaattattgtacctacatcttttgtgcttttttcatctaacactttagttttccaaactttcattatgacatcattatagatagtataagcacttggccatggatttactcctctaactaaattgtgtatttctctggcactttttgaaaaatctatgttacctaatgatttattcattattggcgcataggaaaattcttcatgattttgtacttctcttggagcatttccttcttcaattaatcttaatgtttcttttaaagtttctgctcctatattcatcattttatcatgaagttctcctgctgttatattttcatcaagatttacttctgtctttagtatcatatctccagtatctaacccttcatccatatacatagttgtaacaccagtcttttcttcaccatttattattacccaatttataggtgccgcacctctatattttggaagtaaagaaacatgaacatttatacatccaagtttaggaatctctaatatttcttttggaagtatctgtccaaaagctacaactactattacatctggatttaaagatttaattttatctataaattctttatctctagcctttactggttgatatacaggtatattattttcaattgccagttcttttactggactcatacctagttttttacctcttccttttggtttatctggttgagttacaacacccaatatttcatacttctcatctattattttttgtaaacatggaactgctatatcaggagttcccataaatactattttcatcaaatcaactcctactacttttctattttgtcaacaaataaaattccatctaagtggtctatctcatgacaaaatgctctagctaaaagttcttctccctctaactctattgtttcgccatttctatttaaagctctgacctttacataatttggtcttctaacatttccagcttctccaacaacacttaaacatccttcctcatctatttgctccccagatgtttctattatttcaggatttataagttctataagctcttctccaatatctattactactactctttttaatattccaacttgaggtgcagccagtccaacaccatctgcatcatacatagtttctgccatatcatctaataattgtattatcttttcatcaattttttcaaccttttttgatttttttcttaatactggttctcctatttgaactatttgtcttaaagccattataattcctcctaaatttataatacactgtttggattaatatctatagatacattgatattcttatcaaatatcaaatctcgttttgttatacatatatattttattataccctttaagagattaatttcaatattttcatctttaaagagtatttgccatctataattttgatttatttttgatattgaacatggatttggacctaatataaatcctaaatcatttataccccttttttctaataaataaatcaatgatgcatgcatattttttatattttttatcactaatctttcatcttcaccactaacaactacacttaacatattattaaaaggagaatatccaaatgcttttcttatttttatctcatcttcataaaaaccctcataatcatattcaatagcatgcttaatagcatagtgttcagtgtcataagtctgaagtactacttttccctctttatcagctctccctgctcttccagagacttgagttatcaattgaaatgtagtttcaaaacttttaaagtctggaaaatttaatatcatgtctgcagacaaaatacctactaaagttacattctcaaaatccagccctttacttaacatctgtgttccaataagtacatctgcttctttatctttaaatttatttagtatctcatctaaagcacctttttttgaagttgtatctttatccattctcaaagtttttatatctggaaaaatatattttaattcctcttcaattttttgagttccaactccaaatggcttaacataagtacttttacattcaggacactcttttggaatttctttctcatatccacaatagtggcatcttccagtattgcttttcttatgataagttaaagatatatcacaattttcacattgaaacacatatccacactttctacaagatacaaaatttgcataacctcttctgtttaaaaatagtatcacttgattattttcttcaatcgcataacgtatttctttttgtaatttcaaactaaatatacttctatttcctttatctaattcatctttcatgtctaccacttcaatgtttggaagaggcttatcatttgctctactttttatatttataagtttgtattctccagattttgccctataatactcttcaattgagggcgttgctgaacctaaaataagagttatattattttttaatgccataaatctagcaacttctatagcattaaattttggattcttctcagacttatatgatgactcatgacattcatcaattattattaagcctaaggaattaaaaggtgcaaataaagctgacctagctccaattaacactcttactttacctgctttgacagctttgtaaacatcatgtttttctccttcagatagtttactgtggaacactccaactaaatctccaaacctactctttagcctatctattgtttgaggagttaatgctatctcaggtactaagaatatactgtctaagccttgatttagagcaaattctattatttccatgtaaacttcagtttttccacttccagttactccatgaattaagtatggttttttatcatctacaaacatattcgactttatctcatcaactgcttcttgttgttcattgtttaattttatactttttagtacggatttgtaaatactttttggctctctataataatccttaaattctagggttattagctttttcttacttagagaatttatactttgttttgaagcatttaataaatccaataaatcatttatctctacattttcattatttttaagaaaacttaatatctctttttgtttacttcccacatttattttattttgctctatataatcgtcaatcttatcactttctaaactcaaagatatataacatactttcttttcatttttgtgatttttatattcccaacataattttataattccatttttattcattgtgtacaaagaactatttaagtttggtatatattttaacttatcaaccttaattttacctttactatcaatcactttctctactatttctctatttttatcacttaaagttgatattttttccttcaattcaatctcatttaatccacttaaactttcacctaataggactactttataattatttaatttgtatccctttggatatatcaaatttatacattctatataagtacacaaatatctatttttcatccaataaaccaactctaaatcttcttttctaaatattggattttcatctaatatatcaataatttcttttatttttattttttcatctaagctatctgtaaattgaaatacaaaggcttctgttggtttattaccttttccaaatggtactaatattctgtgcccgatttttattacatcagataaaaatacaggaatttgatatgtaaataaattatctgtatatatagtattacttctaactattacctttgcatattttttcattataaaacctctacttaaatttaatatattgttcatattttaatatactttacaagatattaaaatctcagaatttataagcaatttcaagttattaatattaactttattttaataattaactattaattatattttatactttatgacaaaataaatgctgaaaactacaatttaactgacatttgcgagtttttactcgctaaaattaaattgcagctttcagccactttagctgtgataaaatacacaaatatcatatttaaaaaaggtcttatttctcaagcaacgctttaactttatctaaaataacattggctacttcttcttttttcatcttaggatactcagtaatatttccctctacatctattatttttacaatattagtatcagctctaaaaccagcaccttctttagttaaatcatttgccacaataaaatctaaatttttcttttttatttttcctttggcatgttctataaggtcattagtttcagctgcaaatccaattagtatcttatcttcttttatttttcctatttcataagcaatatcataatttctacttagttctattgataaatcatcattcttctttttaatttttttgtcagaataagtttttggtttataatctgcaactgctgcactttgaattactattttattttcacttaaatttgatactactgcttcatacaaatcttgtgctgactctatttgaacaaattttttaagattttgtggaatagaaagatttgtaggacctgatattaatgttacatcagcacctctagctatagcttctcttgctatagaatatcccattttaccagaagacctattagttaaatatcttactgggtctatactctctacagttggaccagctgtaactatcatactttgaccttttaaatcttgctctttagtaagattagtcaaaacttcctctactattatgtctggattagctaatttgcctgttccaatatctccacatgcaagcctcccactttctggttcaataaatttatatccaaagctctttaaagtttgtatatttttttgaacaattggattttcatacatattagtattcatagctggtgctataagaacctgtgctttggttgccataacagtagttgtcaacatatcgtcagctataccatttgcaatcttgcctataacatttgcacttgctggaactattaagaataaatctgctttttttgctaatgatatatgttcaacttcccaagtttttggttcttcaaacatatcttctactacataattttgactcagcgattgaaatgcaagtggtttaacaaattctgttgctgattttgtcattataacatggatatttgcatttagtttttttaacttacttacaacatcacaagccttatatgcagctataccgccacttatgccaattacaacagttttatcttttagcatgaccttactcctcttctgaaatttgttggtgttgctcagcatgatgtctagcttcttctatctctatttcctcttctgtcaataatctatatgttatttttccacttgcaacttctttagttgctacacatacaggcttttccttagttttatttgaaacatatggttcttctccatcaattaattttcttgctctctttgaaacagtccctactaaatagtatctgttgtctattttttctagtacctcattgatagatggttttaacataattataattcctccttaaatttctctattataatatttttatatctgctaactttattcttttcagatgatattataccttctatttctttagcagatgtttttacatcttcattaaatataaaataatcataatccttaatcattttaatttcttcatatgcacagctaaatctcttctctatttcagcttctgtttctgtacctcttccaacaattctattttttaattcttcaagtgatggtggtagtacaaatataaatactccctctgggcaaacttcttttatttgttttgctccttgcatttcaatctccagtaatacatcttgtcctttttctaaacattccattattgccgcttttggagttccataaaaattatcataaatttgagcatactccaaaaactcacctttttctatcatctcttcaaacttttccttacttatgaagaaataatttactccatcaacttctccagttctgggttttcttgtagtagctgatacagaaagttttattgtatcattttctttaagtagttctttgcaaatagtaccttttcctgcacctgatggtcctgatacaactagcaataatccttttttcacaaacatttaagcattccccttctaatattgtattcttactctatattttgtatttgttctcttattttttccaattcgctttttacttctactactaaattagttatatttatatcagatgacttcgaacctatagtgttagtttctctattcatctcttgtattaagaaatctatttttctacctatagagtcgtctttaaatatagtatttttaagttgccctatatgacttttaaatctaactatttcttctgttatactgcttttatctgcatatattgcaacttcttgtgctaatctattctcatctattatacttgggtcatccagtaattcacttattctcaaattcaatttttctctataatcttctacaacactacttgaatatttttcaatctcttctatatgattttttaataaatcacatctcatggcaatatcttcagctaattttttaccttcttcacttctcatttctcttaatttgattaatgcatcttcaactgcttgattcaacattgaccacaataaatcttcatcttcttccttttcttctattttcacaatatcaggaaactttgcaacattcataacgctaatatcatctataatatcaaatttattttttatttcttttagtatgtctatatactgagatgctaatccctcatcaaaatttaagtttacatcttctttgcctaataagtcaaactttatgtataaatctactcttcctctttttacataattttttactaaatttctaactttatcctctaaaaatgaaatttttcttggaagacgtatgtttatatctgaatacttatgatttatcgttttacactctactaaaaagtaataattatcatccttgtattctcctcttccaaaaccagtcatacttatagccattaattaaacctccaaaacaccttcacatatttttactgctggacctgtcatataagagaaatctcctacatctattttaactgttccaccttgagacgttacatttacactactttctaccatattaagtaaattgcacactattgctgatgcagtcataccagtaccacaacctaaagtatatccacaacctctttcccaagtataaacatgtatattatacttatcttctacctttacaaaatttacattcgttttttcaggaaatattttattattttcaatctcttttccatatttacaaacatcatctacatctaattcatctactataactactgtatgaggaacccccatcaacatagaagtaactttaagctccctatctaaaacctttatactttcttgcacaaaacgttctttatttgtaagtacaggaacatccttagctataaaacttccttttcccatattgactcttatagagtttatttctctattggtaagatttatttttatatcttttataccatctaatgtatctactgtaaaactttcttttttaactatacaattatcataaacaaatttacaaaaacatctaaggccatttccacacatagctgctcttgaaccatcagaattataatataccatttctacatctgcaacttttgaatctttcacaactaacaatccatccgctcctacagaaaatcttctatggcatactttttttgctaaagcagtataatcagatggatttatctggtcgaatcttccatctattgctataaaatcatttcctattccatgtagtttccaaaatttcataagtatcgctccttcgtaaattaacgcttaaactattataacataaaaaaattcccataaacttataatttatgggaaaagttttgtaatgacaactataatttgaggatgtgagggagagttgtcattacaattagggtaattatattatgtttttaagctagttctttctatgtttatatattaatatttctatatgaattttatgtatgttttatttaaactgtctatgaattttttaattaaacatctggtaaccagctataatccttttagtagatatctattaacatacacctattaattctttaagtgtttttaaaacatagtctaaatcttccttagtaatatctacatgagttacaaatctatattcaccattttccattttattaatttttatatttctttcaaaaaattcttttattaaaacatcctcttttataatatcttcactcatcttaaaaaataccatacttatatctggattaacattgtttacttcaatgccatcaattttatttaattcacaagctaaatattttgcattttcatggtcttcattcaatcttaaagtcattttttcaatggcaattataccagctgctgcaactatacctacttgtctcattcccccacccataactttttgctttcttctagcttttgctataaattctttacttccagcaagtatagaacccattggtgcagctaaaccttttgacacacagaacataacactatcacaacactttgctatttctttagcttctacacccaaagttaatgctgcgttaaataatcttgctccatctaaatgtactggtaagttgtgtttctcagctatttttttaatttctcttaaattatcaagactcacaacagttccacctgaatatgcattttctacacatataagccctgtctgtggttcatgtatgtcatctcttctaattgccttttcaacaagttcaggatttagagctccactttcgtcttcatctatagttctaagctgaactccagctattacagcaggtgccccaacctcatgagttacaatgtgataacctttaccaataattatttcttgccctcttaggcaatgagtaaatagagctaattgattcccaaaagttccacttggaaggaaaatagcatcttcttttccaactttagctgctgctaattcttcaagtttatttacagtagggtcatctctaaagattgaatctccaacaggagcctttgccatagcttctctcatttcgtcagtaggcatagtaacagtatcacttcttaaatcgataaatctcattttttcaaccttctttcatatttatatactatagaaccttaaaattgattttttctgtaaagttcatatactttcatagcttatactctacacaataattatactatatttactttatatttaatctactttaaattattaattttaaaaataaagtttcctctctaataagtataaataattatacaatttaaatattaatctctatcgtttaaattccccctagtcacaaagcgtatattatgtgtataattaatttactgactcattttggtcaaagaaaggggtgctataaatggcattagatggattagttatacattcaatagtcgatgaattatcatcaaaacttacaggtggaaaaatagataagatacatcaacctgaagatgatgaggtaatttttaatataagaaataataaagaaaattttagattggttttaagtgcaagtgcctcaaatcctagagtttatcttacaagtaattatcaaaaagaaaaccctctaaaagcgcctatgttttgtatgttacttagaaaatacatacaaggtggaaatatagtagaaatttctcaaataggttttgaaagaataataaaaataagtgttgaatctttagatgaattaaaagaaaagacagttaaaaatattatgattgaaattatgggaagacatagcaacataataataactcatggtgaagaaaataaaattatagattctataaaaagagtcccttttagcataagtagagttcgtcaagttttacctggtcatgattattcattaccaccagaacaaaacaaactcaaccctcttgatgatatatctaaggatttgtttattaaaaacctagaagaattggaaggacctatctttaagtctatatattctaaatttctaggtataagccctattatagctaaagaaatttgctacagagcaggtgtaaatcaaaatgctatcataaaggatatatctgatgaacaatttgattctttacacaaagtattttgtaatttattcaatgatataaattctaacaaatactccccttgcattattatagataaaaaggtggataaggtagttgatttcagttgtataaaccttacattatttagcgatttatcatatataaataaggatagtatgtctcgtattctagaagatttctatagaactaaagatattaaagacagaattaatcaacgttcatctgatttaaagaagagtatatctgttaagcttgatagactttataataaacttaaaaaacaagaagaagaattatcagaatccgaaaatgcagacatttataagataaaaggagaattgattacttcatatatttatatggtagaaaaaggtatggaaagtattgaaattgctaacttctatgatgaaaattgtaatgatgtaacaatagaattaaataaaaacttgacaccatctgaaaatgctcaaaaatactttaaaaagtataacaaaatgaaacatgctaaagtcgagatatctcatcaaatttccttaaataaggaagaaatagattacttagaaaacatagttttaagtattgaaaactgcgaaaatttagctgaattacaagatataaaagaagaacttgctaaggttggatatatcaagactcaaaagaaaaacagtaaaaaggatactatcccatctacaaaacctcatgaatttgtgtcttctgatggatttaaaatattggttggtaaaaacaataagcaaaatgactatcttacactaagacttgctgataatgatgacttatggatgcatacaaagaatattcctggttctcatgtaataataaagtgtgctggtaaggaagtccctgataatactgtatttgaaggagctatgctagcagcattctttagtaagtcaaaactttcttctcaggtgcctgtagactatactaagagaaaaaatgtgaaaaaacctagtggttctaaaccaggtatggttatttatgaaactaacagtactatttatgttactcctgaagaagaaacagtagccaagcttaaggttaaatctgaataaattctgcactaaatacaaaataaatgttagacaagcacacattatcattctaaataaaaatagtggccttcttataaagtacaataataaggccactttctaattagcttacttttaattttctaacaaaatacttttctgttttaataactatacttatattcccaacaaatattttcagtcttcttatatagatgtaattaaaaagttaacactaaaagctattttttaatttagtgatttgttttagtaattcattatattctgattcatacaattctttttttagattatctttttctatagataacatagatataacagttgtaagtctattttctaatactagaagattctcttttttgatttgcttgtctctactaggagtttttttatttctgctaattatatattcgtcataattacaatcaaactcccttattttagcatcttttatctctataatatagttacaaatatgtgatacaaatactctatcatgagacactataagcatagttttatcagtatttatcagtgccttttccagtgcttccatagattttatatctaagtaatttgttggttcatcaaatactaaaaaattattatcttccaatattattttacatagtgctatttttaccttttctccaccactaagtacttttacttttttgtagacatcatcacctttaaacccaaataggcttaagtttatccttataaaagattcatcaaatgaactattaactttagtattgtatagaacactcttttcctcatctaataaactttgattttggtcaaaacaacctacttttaccttgttatttatttttatattgtcatttttatcagccaatatttcttttatcagagtactttttccacacccattatcacctaataatgctatctttttacctctttttatcttaaaggaaacattatctaacaagagcttattttctaactttagagtcatatcttttacctctaatagatttttgctaattatctccataccatcttgaatcttaatgttcatttctttagaaactttaggtttattctttacctcaagtttatcaattctgctttttatagccttcacatttgagtccaactttttcttattagtctgaccacccattttgtgcaacctagcttctgaattacccattctttttggtgtctttcttatgccatcacttaaagcttttttatataaaagagctttttcaagcctttttttctctttaacatattcttgatactcaaaatcagctctttttacttcttcatctttttgcattaaataatcagtgtaattgcctttgtaagcttttagttttccatcttctagttctaatatagttgtacataactcatccagaaaacgtctatcatgagatattaataataatgctccctcatgccttttaaacatatcttccaaaagcccaatgctttttttatctaagtttgaagttggctcatcagctattatgatatttttcttattactcagcgcatctgctatttttaacttaaccttttcccctcctgataagtattcttcaaatttatctggagcatttaaaagactcttctccttactatgactacatgtttcaatattattttcactctgacttatataagaatagctttctgtaaggtaagtatatccttcatcaatttctatttcacccaatattgcttttaataatgttgtttttccttgaccatttgaaccaactagacctattttgtcattttctaatatttcaagtttatctatatccaaaattaatttatctgcataatatttctttaaattctctacttttactaacaacataaaaaatccctccttaacacacttaaatataaggagagattctataaataggcataacaaataaacgtatagactataatctactctccttaatttaagcattgcaaataaagccatcaaaataggcttttcaaaaattacaatactttaaattataaaaaatagattatattctcattgtcctagttaccttgccctttctttcatttatttttaatcattatatcaacattaattacaaatgtctatagaaaattaactaattttagttattcaatatacaatttattctttaaatttattcttcttcaactttaaaatcctgattatttaaaattctgtttaatacaattccaacaattgcagctaaactaagaccagttatctttactgtacttgttatagggattccaatagaaatgcctttattagataaatatgttgttccaagacctattaataatataactgctattattaatatatttatcttactttctacacaagaactgtcccttatagtttttaatcctacataagttatcattgaaaatagcattatactaattccacccataactgaacctggtatactttgaagaaatccaccaaactttcctacacatgcaagcaatatagcaaatattgctgtacgtctaagtattgaagggtcatagtttttagttatagcaagtactgctgtattttctccataagttgtattggctggtcctcctaaacaccctgcaactatagtcgcaaatccatccccaagtaatgttctatttaatcctggattttctataaagtttttacctactacagcaccattagtagtcatatctcctatatgttccataaatacagctaatacaactggagatataatcacaattgctcctaaactgaacttaggaactgtaaagttcggtattgcaaataaacttgcttctgtaatagtagttatatctactaaccttaacagtaaacagattatatacccagaaaaaacggctattaatattcctaattgttttataaatcctctaccaaacttattggttaaaattgctattgctaaagttataaatgctattacaaaattagctgaagccatactaaaagctgttggcaataaatttaatcctataactactatcatagctcctgtaacttgtgcaggaaaatataatttaattttatttacaccaactatttttactataatcgacattataatataaattaatcctgctactattataccaccttgagcatatgctaaatctccaccatacgcctctttagctgctagtataactggtataaacgcaaaacttgaacctaaaaaggcaggtacttttccttccgtacaaaaatgaaatatcaatgtaccaacaccagcacagaaaattgcaactgacggattaaaacctgtcaaaatgggaactaatactgtcgctccaaacatggctaatagatgttgtaaagacattattgtttttttcataaaaacctccaaaattattatatataaataaatcctctgtttaattaatatcttttaattaattatcattccctagattctattttttaacctctatatacttattatataatttatcattattttacattttacgacatcaaaaactcaaataaaggagaataaaaactacattaagactcacatccataaaattataatatttattttgtgcaatctatgtaagctttatcctcctccctgactattcaatgctaagcttttatataatacttaaaactaattattctttgattgtaactgaatcttctccatcaatttctaataaactgacagatataatttcatgtctagaagtaggtacattttttcctacataatctgctcttataggcaactctctatgccctctgtccactagaactgctaattgtattgatttaggtcttcctatatctataatcgcatctagtgaagctctcacagttcttccagtgtataaaacatcatcaaccaaaactactgtcttatcatttacattaaaatctaaataagttcctttaactacaggttcaacatgaattttttccaaatcatctctatataaagttatatcaatatctcctgtatctacttttgttccttctatttgttctattttcttagaaattctatttgcaattggcacacctctagtttttattccaactaaaactagattttctacacctttatttctttcaattatttcatgacttattctagtaattgctcttgctattgccttttcatccattaattgagctttttctaccatatcataattattgtcaaagatataatatatctatttgacaaatctactcctttcttttaattttttataaatttatttttatttaaaatttcaatttaaacaacaaaaaacttctcatcacaagacaagaagctcttatataaaaaatatacagtgtaatttagcaattgtcttacgatatctctgtatcgtttaaagataattttttaatctatcaactcaaattatatatttatatttcaaatttttcaagcttttttaaacaaaatactttaatataagatattttatttaaatttcactaaatttatttacttatataaaaacaaaaaatgatttataagtattatacaaatggttattttatcttcttaatagcttccttaaaatactcaggtaattctgaattaaattcgatatattccttagtggtaggatgtataaatcccaacttcttagcgtgcaaagtttgtccttttaatttaaatttagtttcttttggaccatatacaaaatcacctaaaagtgggtgatttatagacaaagcatgaactcttatttgatgagttctaccagtttcaagcctagctctcatatgtgtaaacttatcaaatctttctacaacttcaaaatgagtaattgcattttttccatcctttactacagccatttttaatctatccttaggatttctccctataggtttatcaacagttattttatcttctttaaccacaccatagcatataaattcatactctctagttatagtatgttcctttaactgttctgctagaaaattatgtgcataattgttcttagctatcataagaagaccagaagtatctttgtctattctatgaactataccaggtctaataactccatttattgacgacaacttatctttacaatgatataaaatcccatttactagtgtattttcatagtttccaggagcgggatgaacaaccatatcctggggtttatttattattaagacatcatcatcttcatatacaatatctattggaatatcttgaggtaaaacctctaatactttaggttctggtatctctataacaatattatcttcctctttaactagatatttagctttttctactttattattgacctttacttttccatcttttataattttttgtatataacttcttgacatatcacctaattgttctgctagataaatatcaagtctaacttcttcttcctcttcaagtactaaaaactcttttacttcatccattatatcacctacttttactttcaaaaaataaaacatatatacataaaaacacagttcctacaactacaaatacatcagctacattgaatacatattcccatataactctaaagtcgaagtaatctaccacaaaacctaatcgtactctatcaattagatttcctaatgcaccagatataattaatataattcccaaccttccaaatatatgtactttccttgtattaagatagtataatccaaatactgttgcaagtaatgcaacaattataaatatccactgattattttgtaataatccaaatgctgcacctctattttcgacataagttaaatgaaatacattatttattattggtattgttgaaacatctaccaaattattcaatacccatattttagacagttggtctaagcctatgagtagaattattattaatatatatagcaatgatttttccccctataaattatttaaaaaccaattttatttgaaacacactattattattatacaaaaaaaatgctctaaagagcaactttattaaaattgtattttcttaataaagctagagcaaaatttaaaatagtaccatcttttttatattgcagattgctacatatttaaaatcatattattatgtataaaaaatttaaaaataacatactaattaatactttttgtgtgttttatagattaaagattaatgatgtctgtactttaaacttacaagcaccactaatcttcaaacaaatatttttacttttgcacttgcttatttttatctaaatgttgtataagttcagatactgttacgaatttatatcctctctcttttaatttaggaattactacttctaaagcttgtatagtttgtgatttatcatttcttttagtgttataatcatgtaaaagtattatattaccattttggacctttgtaagaatagtatttataattgtatctacaccagggttagaccaatctctagggtctaagtttgaccaaagaattatattcatgcctttagaaactataatatcacagacacttttactcatggctctatatggaggtctaaatatctttggttctactcctattacactttttataatattttgtgtatctgttatttctttttcaacactaccataactattttttgcaacatttatatgtgtaaatgtatgattccctatttcatgcccctcatcatattgcctttttaataattctttgttatattctactttttctccaactacaaaaaaagttgcttttacattatttttctttaatatatcaagtatttgtggtgtaaaatcctcatctggaccatcatcaaaagtcaatgctagaatcttttcatcctcatttcctttttttattattacatcttcataatcgtcttttatattgtcatttaaagtataggtttcttttgaactattttgattatgtgtattatggttatatgtatatacacctactatggataataaacatatacatataccccatattgctttcttcatgtcattacctcttttctaattcattctaacaatatatgatgtcaggcttctaatctctcaatgttccatttttatttaaatcagttaaatttgttaggtcttctgaataaaagttagaatcttctacatcaggattttgcattgcatcacctaataaagcattttctttttttgcacaattgttacataaatttgtatcaggtaatatatctaatctttctaaatctatttgattgtgacataaatcacaaaacccatatgttccattttctattttagataatgctgaatctatttgatacagtcttccttcttcatgatttattaaactattttgcatattttgcatatataaatccgttcccatatctccaatatgattgtcataactagataattctcctgatgaatatttttcactagtatgtttagtagtgtctccaaacaaggtattatctttcatatctacgactaaattagttaacttttctctttcttttaataatttatctttgtattttttagtatccattttcaacacctctaattttaatatttatatcataaaaatagtatgtggaaaactaaattaaaaatacaataaaaaacaagatttgattttttcaaaaaaaattgtaggtaaacttaaaattcacctacaaattctttacatatatttttaatataatgtttttagtttttgataataattacattaacttgctaatttatgagcattttgctcttttatatccttagcttttttaaaaaataaaagtccaaggattattgcaactacaatacctattccattagatatattaactggaagtctaaatccttcttttgcctgcattatataactaaatgttactacagtcataaaaagtgctggcaatgtagttatgtaatgatttttatttgctttgactaaatatgcagaaccagtccacaacattatcatagcaagtgtttgatttgcccaagagaaatatctccaaattatattaaaatctataaatgtaagggcaacccctacagcaaataatggcaaagctattaaaaatctatttttaactgcatcttgattataattcattgcatcagctattgttaatctagcacttctaaatgctgtatcccctgaagttataggacatgctacaacaccaagtatggccaaagcgcctccaataggtcccattaatccaacagatactgtatttacaacagttgctgctccaccatcattaaatattacattaagctgaggtataccatggaaatatgacatagctgctgctgcccaaactaaagctattataccttctgcaaccattgacccataaaatactggtcttgcctcactctctttctcaacacatctcgccataagtggtgattgagttgcatggaaacctgatattgctccacatgctattgttataaataagtatgggaataaaggtgttccatttggattcatattttgtaaatttatatttggtatgttatacccctttattattaatcctccagctacacctactgccataattaataatgctgctccaaataaaggatatattttaccaatcaatttatctattggtaaaacagtagccataatataataaagtattatcactccaacccatatttgtgcgtttacacctgtcaatgtctttaataatcctgctggacctgttacaaatacaactccaaccaatactaaaagaataacactaaatattctcattgctatttttgcaccatttcctagataaagacctaccaactctgatgcagatgtacctttgttcttcattgataaatatcctgaagcaaaatcgtgtactccacctgcaaagattgttccaaacacaatccacaaaaatgctgatggtccaaataacgccccttgtatagctccaaatatcggacctaaccctgctatatttagaaactgaattaaaaagattctcttccatttcattggcacataatctactccatccctacaagctatagctggagtttggtttttgtcattgattccaaaaaccttttctacaaaagtaccatagataaaataacctactataagtactactattgaacctaaaaagcttaccataaattcatccccttagtttttatataattgctttataaatttttatgagtttaagaaaactatttccagttcaaatagtaatacttttttatgctaatataaatattaattacattaagtgcatatttaagtacatgaaatgactttatatatgcattaacagcctaaattcttttactttgcttctgcttacagttacttcatagtcactattttttaatttcaatatgtatgtattgttaaaccatggtataatttcttttactttggttaaatttacgatataagacctatgtgttctaaaaaatgttttatcatttataagattctctacttctgatatgccttcttttaatataaacttttctttctcagtatatataaatgtctgcctttcattagcttcacaataatatatatcatcaatatctattacaaccaatttatcacctttccaaaggctaattttatgtgttatttcttctatctcctgatttactgtctcttttttatatttatataaattactattgctattagacagttcaatatcactcatctcacttttttctaatttattcaacatagaaataattctctcttcagaatatggcttcagtacataatcaaatacatctaaagaaaaagcatctactgcataattttcatacgctgttataaaaacaattttaggccttgatttaaactgatttaatgtttttgcaagaagcattccatcgagatgaggtatatttatatccaaaaaaattacatctattttattttcctgaataaagtctaacacttctataccattagtaaattcatttactacctctatgctacttttattctcaataaaatatcttaattcctttcttgccggaaattcatcttccactattatagctctcatacttctactcctttacataaaatactatcaaagtcccattgtctgttcttcttatattaagccctcttccatacatcagtttaagccttaaatgtacattataaagtccaatcttattttctggcatattatcttgatatacattatttataatttcctcacttatacctataccattatcctctattgatattctcacagtattttctaatgaataaggtaacttttttatggatattttcactacaccagctctaccactttctaaaataccatgtattatcgcattttccactaatggttgtataatcaaacttggaatctttatatttacatcttctatatcataagatacagttagtaattctccaaacctagctttttctatctctacaaaagatttaacttgttcaatctctttatttatatcaattaagttatcactatattcaagattatatcttagataagttgataaatttattattaactctctagccttatctggactaaatcttataaatgaagctattgtgtttagggaattaaacaaaaaatgcggattaatttgtctttgaagtgcttttatttctgctttatttctcgcttctatatcttttttatctttctcaatcccctctactatagatataacaaatcctattccaatctgtccaacaattaaaggtaaatatatcccaacaattatttgaattgctaaagaatgtggatatgatattaagtatataagtagtatagtaaaactttcagaaatcatacctaccaatataccatacattactctatgttgctttggtatcctcttatatagaaatcctgataatacacctgctagtatacttgataaaagacatggaacagatgttatccccccaatatccataaaatatctatgaatccctgaaaaaactcctgctgtaatacctaccattggaccaaataaaatgccacctgatactatagatattattctagtgtttactattgaccccatataatttataccactataagttccaaatatggctaaaaaagtaaaaactaatgctatacagaccaagtcattaaaactatattcttccttttgaaatatctgcttaaatatttttaactttgttattagaagaaacagtactacaatgaggcttgtcttttctattaatgcgattaaaattgatgttttcatattccacctttaaaaaataaatttttacacactctaaatttattatgtttgttgtaacttatatatttgaagtaatcctatctcgacattttccacatttaaccttttaattaaataaaaaatggatatacttctattaacaactaatactagctgactaacacaagcttgtaataacttgtagttatcattaactctacaattctagtatttaattttatactttagaaatctcttttcttagaagtaatactttcgaatattatataatacaatgttatgtagattcttactcatacaacatatttctttaaaaattttatactattctttgttcaaatatctcatttgatttaattgtgctaaacacacattatcatctctctgttatatatttattatatagccgtatatcgataaagtaaataaatcctatatttaaaatcatatgtttgatagtaaatcattataatgtatatttaccataataatttgccaaccttgaaagtcacttctataattagaagttaaataattcttctaaaaaaaatacctctaaattttattttctgaaatacatagttataactatttttatcacgtataagaataaaaattccagaaaatttttattatctaagttaatataaaacatattatttaatataaataaattttttataataatatattgatttaatttactttattattgtaaactataagtataagatatactatataaacaagcataaatataccttaattctaactatccttaattttatttatctcctagtgttattttacgtattttttataaaatacttttagtttttttacttttgaattttttataggagggtatttagtggatatattaatttttgataacgatgttataagattatattataatgcaaatttgttattaaaagaacttactgaaaaaaataaagtaaaaatatattttatagttgtagatgcaaaatacaagataagtaatgaattatgtgatggattatggatagcacaaaaaattagagaatcagattatattagtccaatcatatttcttacaaatcatatagaaatgattttagggatcttcgattataggttagaagttatggactttatattaaaacatgatatggaaattgctgaaagtaaaataaaagcttgtattaaaattgctcataaaagatacgttaaagaaaaaaattatcgctctaatttttttactatctactcagattcctcactatggaaaatttcatttgatgaagttatatattttgaaacaagcgctattccacataaaataaaattagtgactacttcaagaatatttgaattctataaaagtttaaggtctttatcagatttagatgcatgctttattcgtgtacataaatcttttgtagttaataaatatcatattgtttctctcgacctaaagaaaaataatattaaaatgagtaatggccatatatgtcgtatatctaatacatatagaaatattttaaagaacattattaaaacataataaatagaaaaaagagatgtctcaagataagaatttgaaccatctctttttttatacaaaaaaagtagttcctaagaatcctctatataataatcgttttgtgaaaaaacacataatgactatatcatatacaatttctattagacattgcaaccattgttcctagattatgattcaacaagatagctcattaaatcataaaagtatgaaatagtctctttaaaatattcagttgttattttgtactgacatatcatataaatacatatttttatgatatatagttacatattttatgaaatttatataaaaaattcttatttagattatataatctaaataaattaaagttcaagagttaattaaactaatattgggagggagaataaatgaaaaaatttaggaaacataaaaggattagtaattgtatatctatattgttgatattatatctaactttaggtggtttgttacctaataacatttatgcacaagacttacaaagctatagtgaaaaagtttgcaatactacttacaaggctcctatagaaagaccagaagattttcttaaagataaagaaaaggctaaagaatgggaaagaaaagaagcagaaagaatagagcaaaaacttgaaagatctgaaaaagaagcattagaatcatataaaaaagattctgtagaaataagtaaatattctcagacaagaaattatttttatgattatcaaatagaagcaaattctcgagaaaaagaatataaagaacttcgaaatgctatatcaaaaaataaaatagataaacctatgtatgtctattattttgaatctccagaaaaatttgcatttaataaagtaataagaacagaaaatcaaaacgaaatttcattagaaaaatttaatgagtttaaagaaactatacaaaacaaattatttaagcaagatggatttaaagatatttctttatatgaacctggaaaaggtgatgaaaaacctacaccattacttatgcacttaaaattacctagaaatactggtatgttaccatatacaaatactaacaatgtaagtacattaatagagcaaggatatagtataaaaatagataaaattgttcgtatagttatagatgggaagcactatattaaagcagaagcatctgttgtaagtagtcttgattttaaagatgatgtaagtaagggggattcttggggtaaagcaaattataatgattggagtaataaattaacacctaatgaacttgctgatgtaaatgattatatgcgtggaggatatactgcaattaataattatttaatatcaaatggtccagtaaataatcctaacccagaattagattctaaaatcacaaacattgaaaatgcattaaaacgtgaacctattccaactaatttaactgtatatagaagatctggtcctcaagaatttggtttaactcttacttcccctgaatatgattttaacaaactagaaaatatagatgcttttaaatcaaaatgggaaggacaagcactgtcttatccaaactttattagtactagtattggtagtgtgaatatgagtgcatttgctaaaagaaaaatagtactacgtataactatacctaaaggttctcctggagcttatctatcagctattccaggttatgcaggtgaatatgaagtgcttttaaatcatggaagcaaatttaaaatcaataaaattgattcttacaaagatggtactataacaaaattaattgttgatgcaacattgataccttaatattttttcacataaataatttaatatttttcaaatttaaggaggagaaacaatgaaaatacaaatgaggaataaaaaggtattaagttttttaacacttacagctatagttagtcaagcactagtatatcctgtatatgctcaaactagtacaagtaatcattctaataagaaaaaagaaattgtaaatgaagatatactcccaaacaatggattaatgggatattatttcacagatgagcactttaaagatttaaaattaatggcacccataaaagatggtaatttaaaatttgaagaaaagaaagtagataaacttctggataaagacaaatcagatgtaaaatctatacgatggacaggaagaataattccttctaaggatggtgaatatacattatcaactgatagagatgatgtcttaatgcaagtaaatactgagagtactatatcaaatacacttaaagttaatatgaaaaagggtaaagaatataaagttagaatagagctacaagataaaaatttaggttcaatagataatttatcatcacctaatctttattgggaattagatggtatgaagaaaattataccagaagaaaatttattcttaagagattattctaatatagaaaaagatgatccatttatcccaaataacaatttctttgacccaaagttgatgtctgattgggaagacgaagatttggatacagataatgataatataccagattcatatgaacgaaatggatatactattaaggacttaattgcagttaagtgggaagatagttttgcagaacaaggctataagaaatatgtatcaaattatttagagtcaaatactgctggagatccatatacagattatgaaaaagcttcaggttcttttgacaaggctataaagactgaagcaagagatccgttagttgcagcatatccaattgttggagtaggtatggaaaaattaattatatctacaaatgaacatgcctctactgatcaaggtaaaactgtttccagagctactactaacagtaaaactgaatctaatacagctggtgtgtctgttaatgtaggatatcaaaatggattcacagctaatgtaactacaaattattcccatacaacagataattcaactgctgttcaagatagtaatggagaatcatggaatactggattaagtataaacaaaggagaatctgcatatataaatgcaaatgttagatattacaacacaggtactgcacctatgtacaaagtgacaccaacaacaaatttagtgttagatggagatacattatcaactatcaaagcacaagaaaatcaaattggcaataatctatctcctggagatacttatcccaaaaaagggctttcacctctagctcttaacacaatggatcaatttagctctagactgattcctataaattatgatcaattaaaaaaattagatgctggaaagcaaattaaattagaaacaacacaagtaagtggaaattttggtacaaaaaatagttctggacaaatagtaacagaaggaaatagttggtcagactatataagtcaaattgacagtatttctgcatctattatattagatacagagaatgaatcttacgaaagaagagttactgctaaaaatttacaggatccagaagataaaacacctgaacttacaattggagaagcaattgaaaaagcttttggcgctactaaaaaagatggtttgttatattttaatgatataccaatagatgaaagttgtgttgaactcatatttgatgataatacagccaataagattaaagatagtttaaaaactttgtctgataaaaagatatataatgttaaacttgaaagaggaatgaatatacttataaaaacaccaacttactttactaattttgatgattataataattaccctagtacatggagtaatgtcaatactacgaatcaagatggtttacaaggctcagcaaataaattaaatggtgagacgaagattaaaatccctatgtctgagctaaaaccttataaacgttatgtttttagtggatattcaaaggatcctttaacatctaattcaataattgtaaagataaaagcaaaagaagagaaaacggattatttggtaccagaacaaggatatacaaaatttagttatgaatttgaaactactgaaaaagattcttctaatatagagataacattaattggtagtggtacaacatacttagataacttatctattacagagctaaatagtactcctgaaatacttgatgaaccagaagttaaaattccaactgaccaagaaataatggatgcacataaaatatattttgcagatttaaattttaatccaagtacaggaaatacttatataaatggtatgtattttgcaccaacacaaactaataaagaagctctcgattatatccaaaaatatagagttgaagctactttacaatattctggatttaaagatattggaactaaagataaagaaatgcgtaattatttaggagatccaaatcagcctaaaactaattatgttaatcttaggagttattttacaggtggagaaaatattatgacatacaagaaattaagaatatatgcaattactccagacgatagagagttattagttcttagtgttgattagtatcaaatgatttaaatttgtccccacaatacaatatatatttaccttataaagtactaaaaaattaactttataaggtattttttatttaaatattctcttcttctaacatattcttttttagaactatattgtattataaagataattatctgtatcatatcacctatatataaacataaattcatttaattatataaatttaaaaaatatttttttgatatattattgacaatttccattataagagttaaaattaactcataaattacatattgggtataaaatacaatgtatgttagaagttgtttcagaaggctatggttttctgatttttttatgctcagtagtgatatgcaaaaaagacaaagttgacatcagttaacttttacctttattctactttccccaaagtaagaataatctaacccctttgagatgagcaaaagctcatctttttttattatcaaaagatgctgtctcaaaatagagataatcctctttttcattgttgaagtgattaaaatatattttatttcatacaaaaaagagtgtctcatgaacaaaagttcactttgagactctctctttcatatcatatacctttttaataactttaaaatttatttatcaagtaaagatagctaataattagtatcttctctctataaatccaacttttttataaacttttctaagagtttttctagcttgtttttcggctttttctgctcccatactatatattttttctaaataatctttattattaagaaggtcaacatatttttctcttataggtcttaaagcttctgatactacttcagccacatcttctttaaatatgccataaccctttccttcatacatgtttacaatctcttctacactctttttacttaaattagaatatatatcaattagatttttaatacctggttgttcatcattgtattttacaacacctaaagaatcagtaacacttctttttatctttctctttatagaatctgaatcatctgctaatagtataaatgcattttcatttgaatcggatttactcatttttttagttggctcttgcaaactcatcactcttgctccaccttttgggtagtatccttctggaactacaaaagtaggtgaaaatctattattaaacctatttgctaaatcacgagctaattctaaatgttgtttttggtcatctccaactggaactaggtcagtttgatacaacaatatgtcagcggccataagaactggatatgtgaataaacctgcatttagatttgcttcactcttttgtgatttatctttgaattgagtcattctacttaattcacccatataagtcatagtattcaatacccacataagttcaacatgctctttgacatgtgattgtataaatatagtatttttttctgggtctaatccacaagctatatattgagcaagtaattctatagcattcgctcttaaaactttagggtcctgaggtactgttattgcatgtaaatcaactatactataatagcaatcataattatcttgaagttcagtccagttttttatagctcctaaataatttcctaaagtcattttgcctgatggctgtgctccactaaatataacttttttttcactcatttttttgtacctccttatatatttatattgattttaacatatttaaaactatgtctttagagttattggcagcatcatgtacaaatacatcataagtaacatcagcacttccatctgccttatcagacattgctcttattattacgaatggagtattatttaaatagcatacatgagctatagctccaccttccatttctccacaatatccaccaaaatcatttactaattcttcttttaattctttagaatttataaatttatctcctgtaactactcttccttttaatactttatgagtctttacttcttccacagaagatttgtaagcagcatctataagtctttcatctgctttaaatacagaagtcttcattcttggtataactcccttagggtctccaaatgctgtagtatctacatcatactgtatagcatcagttgatattactatatcattaacatcaagtttttcatttaaagctcctgcaacacctgtattaacaatagcatcaaccttaaattcgcttattagtatctgggcacaaagagcagagttaaccttacctataccacactttactaacactacattcttacctttcaaaattcccttataaaattctaagctagctttttttatagtctctctaatatccattaaatcaactaaaatactaacttcttcatccattgcacctataattcctattacgttcatttttcctcctaaattttctatattaaaaaatccgtcctaaatcaataggacggatatattttccgtggtaccacctaaatttatatacactcaaaactgaatatatatatcttaatatatgctataacgtgcatacacgatatcaaatactctgtaatcttaaattacatttcattttactcctcaaagacccattcaataaatactttttattaagttctcagcatccttaattctctgtgcaaaaatatatttatttactatttcttatctcaggatttaatttattaatttctttattttataatattccttacactataaattgtcaactatatattataatatccaaaagaaatttttaaaatacattttatttagctgttttcttttcatatctattccataaccatagaccagataatataactagaagacctccaccaatcatctctatctcatatataacattttcagcaaatgtcggcataactggtgctgcagataataatataccaactacagttacaactaaaaccatttttgctaaacctaggcaagtacttgttgattttgccatagtataaggtctaatttcatctggtctctcttttcttagtttaatataagaagcatataataatacatatgggaataatgcagttaatgctgtcatagttacaagaacattgtatatagcatcaacagaaggcattaatgtagtcaccaatagtattatagtaactattattgcttgaagtataactgctttagaaggtatcttgtgttcatttacctctaccaaactatctggaaatattccttttttaacactaccaaataacatttttattggtgatgctatataaagaactattgctcctaatactgagaaagctataccaaaagctattaattgaaccaaccaagaaccaattcctaaagacgtacaaacagcagaaagtgcatctaatacacctttagaagcagtaatttggtctggtggtattatcattgttattgcaattgaacctaatacatataatgaagctactattccagctgatattaatattgccttagggaagttcttttcaggcttatctatttctgttatgaagttagcagcagtctctgctcctgctaaaccaaacattatagctgatatagcaacaaatgcatccatattaagttttggagtcattgaagctattgtatatgtagaagctatatcatgttttttcaacataaatactgctacaaatgaaaatattataagtatagcacttggtattgttgaacctaatgcacctgtattagtaaatatttttgtaaaacttattcctttagttgctataagagataatgcccagaatattattaaagataatataagtacaaacatcttattatcagcaagagctggatttcctattgtataagaaacatttactgctaagaaagttaaaaatgaagaataccaaaatattttagctgtccagtttaaccaagaaactaaaaatccatacttttctccaaaggcttccttaacccaatcgtaaagacctccatcacccttttgatatgtagaagctaattcagcgcaaattaaagctcctggtacaaagtatataaatgagaataataaccacataggtattgcacctaatcctaaaccaaagcttgatgctgtagacttagctatccatcttataccatataaagctgatacattcataaataccaaactccataggcctatttttttcttttccatcctaatttcatttcccctctctattaattattttaaatttaatttcaaaattaataaaatagattcattattattaaactgatatttttcaaaatatttgcatattcaaaaacagttttaataataaaccttaaatactttgaaatcaaatcttattaaaaatgataaatttaaaagttttaccactttaattctaatgatactaaatttttaaaattgtttcaatattattttattataaaattttatttattatttttcattagtatataaaaagataaaatacataactttatagacttaatttattacttttatagaattttcacaataaaaagtcattttacttccgtatttaatgcaaaagtagagattaaacttaatataaaaaatatataacaaactttttttatatttctagaagaaaagtatactcttttttgtttaataatgctaaaattgatttgtattgaattttgattaggaggaaattattatgaaagctcaaagattaaatgctgtacttgaacaaatgaaaaaagatgatatttctcaaatgttagtaagtgaccctacttctatattttatcttacaggagtactaatccatccaggtgaaagattattagcattatacttaaatttaaatggcaataataaattatttataaatgaattattcccagtttcagaagatttaggtgttgaaatggtttggtttaatgatactcaaaatccagtagaaataataactgaacatatagacaaaaatgctactatgggtgttgataaaaactggccagctagattcttattaaacttaatagaattaggtggaggaagtaagtttgtaaattcatcttatataatagatactttaagaatgtgtaaagatgaagaagaaaaagagttaatgagaatagcttcaaaattaaatgacaaggctatggaacaacttaaagctactgtttctggtgaacttacagagaaacaacttgttggtaaattatctaaaatatatgaagacctaggtactgatggattttcatttgaccctattataggttttggacctaatggagctaatccacatggtgaacctggaaatgcacttgtgaaaccaggagatgcaataatattagatataggttgtataaaagataactattgtgctgatatgacaagaactgtattctataaagaaatacctgaaaaaggtagagaaatatttgaaatagttcttgaagctaataagagagctgaagctattgtaaaaccaggtgttagattctgtgatatagatgctgctgctcgtgactacataactgaaaagggatatggacagtacttcactcatagaactggtcactctataggacttgaagttcatgataaaggagatgtatcttctataaatacagatactgtacaaccaggaatgatattctctatagagccaggtatatatttaccaggtgagttcggagttagaatagaagatttagtacttgttactgaagatggttgtgagatattaaacaaacatgacaaagaaatatgtgtagttggttaattctaaaatcaatttgataaaattaaaaagccatataaaaatgttttaaacatttttatatggctttaatttctcaatctatgatttatttcaatccattatttatattgcagttattaagattgcaccctttgaagtatatgtccccatcactgaaccaatttcacagattacaacatctttgtattttacatccttttccataacttcccttaccttttgagccttttctgggcaattagcatgtcctataaataaaaccttttcttctttatctttaatttttgactctactaaagtaatcagctttttcaaactgtttccttcacctcttgccttatctataggagttacaacgccatctgcaacttgtattatcgccttaaaattcaaggtatttataatttttcctgctattggatttattctaccacccttaatagcattttctaaagtttcaagtgttccaaaaaatggaggattatctttatatttatttattattgaaacaatctcttcaatttcttttccttcttttattaatattgctgcttttaacactaattgtcctattccaattgacccactaagtgaatctataacctcaacttttttgttatttccttccttttcaaacatatcttttgctaaaagtgcactattataagtcccagataatcctgaacttatattaatcaccaatacactttcttcctgacaatggtatgcttctaaaaatttatcaggagaaggacatgatgtttttggtagtactttactctcactcatttttctatagaaagtttcattatctatttcctttccagatatataactttcttctccaaaagatacatttaaaccaacaacttctatgttgtatttttctattatatcatcaggtaagtcacatgcactgtccactatcaattttattttatccatattaacctcactataagatattattttatttattcagtcggtcgtacgaccgatttaattattattttatatattgaatgaaaaaaagtcaatagatatagattctcgctttattgacaataaatattcataagcttataatgttattaatttgttataaatatacatggaaaggtaggttttatgaaaacaaataatatgaaacaggctattttatcatctgcaaccaatttaatagccaaaaatggagttcaaaatactagccttgctgatattgcaaaagatgtaaatataagtaaaggtactttgtattatcactacgcatctaaagatgatattatatatgatattgcggatactcatttagaagttataactagtgctatactaaactgtgtaaaaaatgtcaaatcaaaaaattctcaaatagaaatggttaacttaatcttagagaaaatatctactatagaaagtcgtggtagggtacatatgtatcttatttgtgaggcaattacttcaaataatgatttaaaggaaagaataagattaaaatatattgaatggagaactactcttaaatctgaaattgttgaatcactagaaaaatataatagtagcgaaaatgaacaggatgctgaatcattttcttttttactcatgtcaatagttgatggtttagttgtccaaagtttattaaaaacagaaaaaataccttatgaaaatatagcttcttttttagttaatcattggatttaaacttaatacttagataattaataaaagtgaactatttaagttatctactttaacagttcactttcttatttattctcaataatttttacttaaaacattcaatttttatttaaaccttcatggaatcacaaaataaaaatctcttataaatttaaaatgtttttatttatgttcatgtgtatgcccatctgaatgttcatgaccatgtgtatgtgtatgctcatggctatgctcatgagtacctgaaaaaccatcatcatgattatggtcgtgacctacaccatttacatgctcatgttcatgcccatgactgtgagaatgttgatgtgaatgttcatggttatctcctccacagcatccttctcctccagtcccacaacacccacttgtatgtggattatgatgatttcttactacaaatctctctcttaacataattcttatacctcctagtatattattgagtacttcatgtaccccattaactacagtatacatctaactaggtataatctcaatacatatggcattttttaacatatataattaacatatataatcttaaagaaatttatccttaaaacctccaccttttacttcttcaacgttattgacagaaataaaagcttcactatccatatcataaattaaatctttaaatttacctatttcatttgcagatattatgcaataaatcatctttttcttattttgtgtatatgcaccttctgcctccaaaaaagtgactcctctacccattttattcattatcactttggatatttcatcatatttatttgatattaaaagtatagatttttttctatcaaagcaatcttttcctatatccatagtaaaagaaattatatacattgtaattaaagtgtacatcaccaatttagctccaaataagaaagctcctgcacatactacaaaaaaattaataaataaaaatgtatttttcataggtatatcatactttcttttcattatggctgctattatatcaagtcctccagcagtagctcttgctttaaaagttaaccccatacctataccagttaatgcaccaccataaatacactgtagcatagtatcatctattgggaaatatttagcaatatcttgtgttagccccagtgctagagaaaacagtaacatattgacaaaacttattagcaaaaatttattatcaaaatactttctagctataataaatattggtatgttcatcaagaaacttgatattccctgatttataccaaataatttgtataatataacacaaattccagctactcctccacttaataacttggctggtgctagatataaatttattcctaaggttgatagaatcatacccaatataatcagaccatattgtaaaaatatgttattctgaacctcccatgactaaagtcacagggttcctgcttcatagaattttgcatactaaaatatgtcttactaattctccacaagctatccccgtagttcctacggttcttacataagttatttattttgaattgttattagtcttaatccttcttttaatatatttatgcttgcatttatatctctatcgtgagtttcattacaactaggacaaatccattctcttatatttaaatccttaacttcctcgtttttatacccacatttattgcatatttgtgaacttgcaaagaatttacctacctttacaatttgtctaccataccaattagccttgtattctaattgacgaacaaattctgaccatgacacatcagaaattaagcgagatagtttacgatttctaatcatattctttacttgtaaatcttctatgcaaataatatcattctcttttattaatttagtagatagtttttgtagaaaatcctttctttgattggctatatgttcttgaagtctcgcaacttttaatcttgctttatttctatttaaactatcgattgtttttctcgataattctctttgtaatttagcaagtttgtttaatgacttcttaagatacttaggattttctataaagtctccacaacttgagatacaaaattctttaattcctaaatctaaacctatctgattattagtattttcaaatacttcaatatctacatcagtacagcataatgatacataatatctaccacttggttctttagatatagtagcattaagtattctaccttgaggtacttgtttatcccttatcttaaccataccaagtttaggtagttttatatattgaccacaatacataatgtttccatttgtaaagttagttttatatgaaaatctattaattttctttgatttaaatttaggaaatcctgctttttctttaaagaattttttatatgcattatctaaatcttttaaggcgttttgtagtgaaaatttgtcaggttctttaagccattttaattctttttttaaattggtcaaatcagaactacactgtttataagtaaaagtttctttatcgtttttataaacttctattcttttagcaagatacttattatatacaaatctacaacatccaaaagttttgttaattaactcttgttgttttttatttggatacattctaaacttatatgccttttccactactatcacctcactctaattgttttttgatacacattttaatgattttatcatatttaatatattatataatgctgtgatgaacaatttattaatcacctatcataatattaacaaatgtaattatttaaaacaattatttagaaggttttatatttaattttaaataacatatttaagaaccgtaagtcttaacttttatcatttttgaggttgtcgttcacataagttcgctactacctatgcagttctcttatgaacttcttacactttcacgtaagcacagactatatcttatccttcggcattatccgttaaggtctacccacttccactaccaatagcttgtagtgtacttccctcaagaggaatagtcgttgaagtttctcctattcggagtttacctgctgattgcccattttaaagtacttagggtttaaccttataccatctaaccaattttttctactttcgtaactttcacacttaggtttatttcatccttatgttttagtttggttagctttaggggtttccagcaattcaagtagtattggataggttctatcctatctctacatataggtttccctatatgctgactattttagctactaactcatgactaaattcacgagtgtgcgtagctattttttaatcaatacttaactttttgttttcaccatacatcaaaacgcacccctttgcataataaataaaccaccctgcagaacacacgataaatttataaataaatttatcagaagtagcttactaaaaatattattcatcctcacttaaacgtttattcattaatattctatcacatgacataaataatttatatgatttatatagatttatttattgtaaattttggaatattaaaacattttattgaatagataattatattacataaaaaatccctatagaaatctataaactaatttctatagggattttggttaactaactattctttttatttttttataacttttatacctgtcatatggtcatttaagttttgttcctctaaagatttatcatctactctgtttatttctaaagctaaagtttcagacttgatatattcattaaaatggtcaacagccttagcaatttcatcatcaccacagtattctattactatattatctaatacttcaaagttattagattttcttaattgctgtactttagatataaattctctagcataaccttcattaatcaactcttcagttagcttagtatctagtataacaaaaagattgttttcaacagatacattaaatccttccttagcagttatacctattaatactaaatccttattaaattcaaaagcttcgccatctaaatcaactgttaaagtctcacctttttcaagtttattagcagtttcatgagcatttaatttacttaatgctccaacgaataaattcatcttagaacctaataatggccctgcttccttaaagtttggttttaaactaaagttcatatactcatctaaatccttagcaaatattacctctttaacattaagctcttcttttattaaatcaactacatcacttattgtatcttcaaacttaccatctactaacactttttgtaatggttgacgaacttttattctttctacttctcttgaagctctacctaaagtaactaagtttttagctaaatccattttttcttctaatttagtatctactaactcttcattacatttaggatattcagctaaatgaacagatacttctcctgttaagtttctatacatttcttctgacatatatggtgcaaatggagctatagctctacaaagaccatgtaacaattcataagttgtattgtacactgcttttttatcttctgttaattcagttgcccagaatcttcttcttgaacgtcttatataccagttagataaatcatcatttataaaatcttgtatcatccttaaagttttatttaactcaaatatagctaaattttcttctacatctttcattaaattattgaacttagataatatccatctatcaagttctggtctatctttatattctacaaaaaattcagttggatttatatcatctgtgtttgcatataaagtaaagaagttatatacattcttcatagtacctataaatttactttggatttcttttaatccatccatatcaaatttagttggagtccatggtggagaaacatatagtaaataccatcttaatgcatctgctccatattggtcaaacaattccattggatttactgtatttcctcttgatttactcattttcttaccatctttatcaagtacaaggtctggaactaaaacactcttatatggtgcttttcctaatacaaatgttgatactgcaagtaatgagtagaaccaacctctagtctggtctataccttctgatatatagtcagctgggaacaattggtcaaaattttccttattttcaaatggatagtggtgttgagcaaatggcatagccccactatcaaaccaacagtctataacctctgttactcttgtcattggttttccacatttttcacattttaagtgtatatcatctacatatggtctatgaagttcaactgtttctggatttacatcttctatagctttttcagctaattcagctcttgaaccaactgaatctgtatgaccacattcacatctccatataggaagtggagttccccaatatctagttcttgatattgcccagtcatttagattttctaaccagtttccaaatctcttctctcctacaaaacttgggaaccattttacaccattattattttctattaatttatctttaagtttagtcatctctatataccagcttggttttgcatagtatactaatggagtttgacatctccagcagtgtgggtaattatgaactactttttctttgctatataatttattttcagaagctagccattttattatttcaacatctagcccatcttccattacaaatctaccttcccaaggagtagatgtaaatttaccagtttcatctactggttgaataactggtaaatcatatcttttacctgtgttgtagtcatcttcaccaaatgctggtgctgtatgaactataccagttccatcttcagtagttacataatctcctactgtaataaaaaatgcttttttgtcaacttctacaaaaggcattaattgttcatattctaaaccttctaggtctttacctttcatttcttctaaaacttcataatcttcacctagtactttatcagctaaaggtttagatacataatatacctcatcaccttttttaacttttaaataatctacatcagcatttactgttaatgaaacatttgatggtaaagtccatggagttgttgtccatgctaagaagtattcatcagcatcttttttcttaaatttagctataactgtattagtttttacttctttatatccttgtgcaacctcatgactagcaagaccagttccacatcttgggcaataaggaagtattttatgcccttcatatatatatccttctttgttgaatttgtttagtatccaccatacagactctatatagttattatctaaagttatatatggattatctaaatcaacttcataagccattctctcagtcattattctccattgtttttcaaatgagaaaactgactctctacatttttggttaaattcagctattccatattcttctatttgttgcttgctagtaagacctaactctttctctacttgtatttcaactggtaatccatgtgtatcccaaccagcttttctctttacttgataaccagacattgttttatatctacaaactgaatctttaagcgttctagataaaacatggtgtactccaggatttccattagctgttggaggtccttcatagaatacgaaacttgggtcatctttccctttttctaaagttttttcaagtatatttatgtctttccaataatcaaaaacttgtgcttctgcttgttttacagaactgtctaccaatggcttaaatttcgccatgtaaatcaccctttcctactaaatattataattccaaaattttttattctttcacataaatttaaatactaaaaaactcgccccctttaaaccaaagggacgagttataaatcgcgttaccaccctaattctatatgtaaactaaatactagctacatataacactctaatagtataacggtactaaccggcacagcttagtagaatttaatcgttcagcctgcagctcaagagtgatttttatctttataaattcattggttctcagcatacccaattctctgtaaaattatctaaagataaatgtctctatcaacgcttttaaaaatttatctgtgtttatatgaaattttataacaaataatttgaatagtcaatatatttttgaaaaatataataatttctatttttcttacatttttatcctatttttaatctttgttatagatttctcaaactcacacagttattctacataaaaaataaacaaattacaagcttattctaaagttgtagcagcttcatcattactataattatacactgttgttccttcaaatgcatttacacatttttcatctacatcataaaaaatctcatcaacacttcttatttcatcttctaacagtgatttaaatttatttctaaatatcttaaattctttgactaaagcatcatactcttttcttatctctatgacacggttattagcttgttctataatttgtctagcttttaaatcagcttcttcaacaattatcttagcctttttattagccgcgctacaagtgtcttctgctgcactttgagcagttattaaagtagcttttagtgtttcttcaatattttcatacttgtttacttggtcttgatataaccctaatttttctttaagagctgtattttccctacatagagattcataatcttccttgatgatatctaaaaattcatcaacctcttcatctctataccctcttaaaccttttttaaactctttattttctatctcaattggagttagcattacatttcctcccagctataatttaaattagtccttatacaattaatcttgcttgaacttttatttttccttttttggtaatatctcctatttgtgttaccttagctcttcctttgcctctaatagaaatcaaatcatcattttttactattttagaagttgaagttatcttttcataattgacatggactttttctccatttatgtattttgcactatcttgtctagatatattgtaaataccacttatcacacaatctaacctatctgaagatactgtaaatgatacttctttatattttgaagaactattaacaatattttctctggaaatttcctttacaattacattatttcttgaaaccttttctaagtttacaattataaaatcgcaaatatcactacttacaactacttgacaaaagctatcatgtataattatatctccaattttttctctttttatacctagacccagtattgaccctaagtaatctttatgagatatatttttaaacttgaaattcccttctatttgtaaaaatctaagagtatcttctatatcttcatattccatgtaaaatggataaataaatacagtgcttctttcagcttgttcataacctccatccacactgtattttatttcatttgtagaatttaatattgctacagcatttttcacttcatatggattaagaaactccgtagacttaacatcatagttttttatacaactattagccttgtctatcactttaaacattttatttttcaagtctatatcctttatgtgatttgttagttttaatttatccatcctatcaccttagaatataaccaatactaattgtcttaggaacatcaataatactattgcaattaaaggagaaaaatctataggtccatttgtatatttatacattatagaccttattggcccttctattggctctgtaagattttccaaaatattaaaaattttactttgtcttccatttggaaaccaagtcatcaagctttttataactatcatccatgctattatatctaaaagataataaagtgcaattcttattgttcccatatattaaccgcctttttactatttattttgccaagggaagaatgctttactttctaattcttttttcatatttgcatctatatccacattattaggagctagtataaatattgatttagaaaccttttgtatacttccatctaatacataaactgccccattcataaagttaaatatagatttacgaacttcagaattagtcaatccttccaaattcactataactgcccttctttgttttagatggtctgctatagttgcagcttcatcataaaccttaggttcaactattacaactttcatttggctagttgtatgtaaatttacaattttatttgcttttgcagtactaaagccactgttcatttcttcttcttgaactatatcgtccatgccactttcatattcatcttcaatataatcttcttcttcatcaactatccaattcttaaatttagatattattccatttgacattattaacttcctccttaaaatttattcaaatttgagtaattattttttattgtagtttctttctccaaagattgatgttccaactctaacaatggtagccccttcctctatagcaatttcataatcgtgactcattcccattgacaaaacatccatccctacattagggatgtttagttcttttatttgttttgataaatctttaagacctttaaatacacctcttatctcatcttcatcttctataaaaggtgccattgtcattagaccctttatttttatatttttatatttttctgacacttctttgacaaaatctacaacttcttctctatcaagtccatgcttagactcttctttagatatattcacttgtactaagcaatctatttctctgtttatttgttctgcacgtttttgaatttcttcgcataatgcaattctatctaaagagtgtatcatacaaactttatcgattatgtacttaactttattggtttgcaaagttcctatcaggtgccagtttaatttgtcacctataatatcatactttctagctaattcttggggtttattttcaccaacagaagtgattccttccctcattgcctcattaactaagtctacatcaacagtctttgtgactgccaaaagggtaatctctttgctgtctctatctactttttttgcagctttatcaattttgtttcttatctcagacaaattatctttaatagaacccattattatcacctactttatccttatatttgtgtttatactgttaggtcttaaaattattttgtcatatagattaacacttgtaactccatttatgtcatttttataataatccacaaatacagaagattcattctcataagttattccttctaatatgacaaattttacactttgtgattgttcatcaattacatatacaccacgtttattgtcttttgtttttatagaagttttaggtatttttaaacattccatctgattatatattatatcaaattcttcgacacttgtatcctgatttgcaacaatttggttacttatttttaattttaccattattttattattattttcatatattttgtaaacttttgcatctaatttttgctcatgatattcaattattacattttgatttttttcaaagttattagaatcttctttactgatgtatgtagatagataattactttggtcattggcatctttttctatagttccttttacaggaatctttgcatcaactttttcattttttaacaccaacgtatctacatttttgctaattatcattactaatatattaaatactaaatatataagaataccaagtatcactaatctggtatattttacctttttcaaagactctccccctataaaattactttcattataagtacttcttctaaaaaatgtttattccttttttataagctaatattttacgttctaataattattttttccatattaaatttattttttatcaatcttcctatacaagactgcattatttatatataattgtattataaagtataagtttaatttacattttatacattaagcttactttatatgtttttatagttatttttatttttagatgcaatataaaaccaattaagatttaaaataacttttgttatgttgacatttatttaggtaatcatttacgaatcgggataacgttatcataacaaaagtttatgtcctaaaaaaaatacaaggaggattttcttatgtcagaaattttattaggaacaggtttacttttattggttctatgttgtttcacaatttttagttacaaggccccatatggtatgaaggctatgggagctctagcaaacgctgcatgtgctactttcttagtagaggcattcaacctttctttacttggtgatgttttaggtatggaattttttagaagtgttggagctgctaatggtagtcttggtggagttgctgctgctatacttgtgcctttagccttaggtgtatctccagtttatgcagttttaataggattatcttgtttagatttttctatattatctggattcgttgctggatactttgtttctttcttaattaagtttatagagaaaaaagtgccacctggagtggatttagtggttgtaattcttctatgtgcaccgctatctcgtcttatagcatcaaatgtagacccattagttaatagtacactactacaaattggacaagttttgatagaagctaccaacattagccctataataatgggaattatactaggaggcataataacagtagttggaacgtctccacttagttcaatggctcttacatctataattggtcttactggtcttcctatggcaataggagcattaggtgcttttggttcagcttttatgaactcaacactatttgcaaaattgaaattaggttctaaaaaagatattatatctgttgctattgaaccattaacccaatcagacataatttcagctaatccaatacctatatattctactaatttctttggaggagccttttctggtatcattgtagccttgatgggtcttgtaaacatgacaccaggtacagctacacctgtggctggttttgctataatgtttgcttataatccagttcaacaagttcttataacagctggtttatgtgctttattcaatgtaattgcaggatttttaggttcaaaaatattcagtacctttaaagttcttactgctggtgaaatacgtggtactgatgtagaagaagaaattgcttaaaaaacaataagatttataaatttatatctcaagtagtagagttttatattgtaggcaattttattaattgcaaacgttttattttttatttatgtttatgattattatgtgtgttgaatatttagataaatttttatttattatttttatttagatttttgtttagttttttatttggttgatatattaggaataaaaattagtatagtttattattagttagatagcataactttttagatacataaaaaattttatattaattagatattattaaaataaaagcgatacatgaatttttaaatgtccatgtatcgctttatttttgccataatcttaacaactgatttttaaagtttattatcttaacgaagttcattatcttatataatatttaaatgcatagacttctttaatttaaccatctaaatatttaattaaatattattatatgtaatataactaatttttaaatgaatgtataggagctggaatccttcctcctctttgagtaaataattcagatgaatttgtacttataggcattactggtgctcgtcctaaaagtcctccaaattctaccatatcacctacatcacatcctggggctggtataattctaacggctgtagtcttattattaatcatacctattgctgcctcatcagctatcatagctccaagcgtacctgctgtagtatttcctggcacagctatcatatcaagacctacagaacaaatagcagtcattgcttcaagcttatctatacttaaagcacctttaataacagcatcaatcatacctgcatcttcagatactggtataaacgctccactaagtcctccaacatgtgaacatgccattactccaccttttttaacagcatcatttaaaagtgctaatgctgctgtagtcccatgagtaccaacaacttcaagacccatttcctctaatatatttgctactgaatcaccaatagcaggtgtaggagctagtgataagtctattatcccaaatggaacatccaatctactagaagcttcctttgccacaagttgtccaactcttgtaattttaaatgcagtctttttaactgtttctgaaacaacatcaaaaggctctccctttactttctctaaagctctcttaacaacaccagggccacttacaccaacatttataattctatcagcctcaccaacaccatggaaagctcctgccataaatggattatcttctactgcattacaaaatactactaattttgcacaaccaaaaccttttgcatcttttgttaattctgcagtttcttttatgatttctcccatttctttcactgcatccatatttataccacatcttgtagaacctacatttactgaagcacatactttattagtacttgctagagcttttggaattgacttaattagtatcttatcaccttttgtatatcccttttgaactaatgctgagaatccaccaataaaatctatacctaaatcctctgcagccttatccaatgtctgtgcaaactttacatagtcattttcatctgttgcacctgcaataatggaaattggagttactgatacccttttatttacaattgggataccaaattcacgctctatatcttttccaaccttcaccaaatctttagcagaactcataatcttattgtatattttttctctagctttatctccatcagggtctatacaatctaataaagaaatccccatagttatagttcttatatccaactgttcttcatctatcatctttattgtttcaagtatatttcctacattcactattatcacctccccttactgtctactacagattatgcattgaattaaatatttcttctcgctgaatttttacatccactgataatttcttacctctttcaaccaagtcctcaaccgttttctcaaaagaatttaatgatttctctaaatcaactatcataatcatagtaaaataatcctgtaatattttttgtgatatatctactatgttgatattttgcttgtataattcatcactaattcctgccactatacctggtttatcctttccaattactgttaaaattgctttcataataatatcctcccttatttttttataaatcttatatttttacaaattgaactatgtattaacatatatttcatttatttgttagtaaaccactttttatgtatatatttaatatattttaatacctatacattcatttgtcaattttttttcaatattccattatttttatactatttagaaaattcatattttatatatgttttctcaacaataaatacagttttcataataatgaaaggtattacttagcaatctcgtgattttctaaataatacctctctaaaaattatttttttaattttatgaatttaattatactttttctagtatcaggatttacaattaatatagaaccaatcataattggtgttagtatacaaaataaaaaaataatatctttttttagattatattctttagattctaatttataattattatttattattccatcataatcacttatatttgacttatttttatttgtatcttgatttttgttagaaatactttccctataaggaaaagaatgttcattggtaccaaatactgattttgagcttaaatcataattatcatcattttctgtaattggatttttattgtaaaatcctttttctttatcagaattattttctttattaccgtctttaggtatatcatgaggatttttattttcattgctatcagtacttgattctacatcatctttaggagtatttggttgtttctcatcagaattattattttcattattattgttttgattgttattactatcattattttcatttccattattcccatcttgattgttatcatcctcatctctatccgggtcgtctctacctcctcctccacggtcaccatcaatatcatcattttcccgttcatcatctggcgtctcttggttgtctccgcctcccattataaatcctggtttaaaaactatatttgaatacccttcttttaatcctcctaccacttttactctaaaacaacgcaacttaaaatcttcaaaaaaaagtatagcttgatctctaatatcctcctgttcttcagatatccaattgattccatcgcttgaatattcaacaaaaaccttacttgcactatacggcatatcataaaataaaacagctacatatccattttttgtattttgaaattccagttccaaattgtctattgtttttttctctataacagatacattcaaaataggaactacatcatcatttattataattttttctttatttaacatttctgttttaaactttcctgttatatcaaaattttctcccttttccaacttttcataataatcagtaaaatcccattctacatctatatcaagttgattaccactagatgtttctaataccatatatttgggaaattttatattttctattttatcatctttacttacttttatttcatcactaaatacaccaattcccctatgacaacatttcacaatattatagccagaatctttagctatagagggtataagctcattataatcatcaattatataaactttcttactttctgatataattgattgtgccaacttattattatctcttagtaacccactttcattgttgctactatatgcttttattgaagtttcttctatctcaacatcacctttagaataaacacctatagcatgttctccattcacttcaatatccttatttagtattctaatatcattttcagtataaattcctattgcatcttttccatttgcctttattttttcaacagattcgtaggatgatttaatatgtaagtctcctccttcttcaacgtataaggctgtcccatcagtagcaattatgttgtttataccaatacttatacttccaccattttctatatgtattactccttcttttcctccttcacctattatattcaattcattatcatcaataataaatctcccatgattttttatcaatattttatatttgttggtatctattgtaaaattactgtcataaggaatataaaatctaaactcttcatctattaccatattacaagaaagagtataaactatttcttctttattatttttattttcttgaacccacctttcaaaatcttcaagacaattttcctcttgtccaaaaactttatgtggaaaacttataaaacacaaaactattatactcataaaaataaatatctcatactttttcatcttacactcctagaaattttttagctttgaaacaatcctgtcgaaacatatacttcacccactataatttttccacaattatcaattattgtcaatttatataagtatctttattaattgttataaataaaaagctacttactaaagtaaacagacgtttcactttaataagtagctatatttttataacaaaatagttataatattagaacttccttcatttacaattttttgtaaagtcttttgcattttaactcttatctcttctggcatagtatataatttactttgtaattgctcttttactaagtcatgtagtgacttaccaaacatatttgattcccataaatctgctggttgctcttcaaatacttccataagatattttatcatctcttcaccttgattttgatttccaactattggagagacctctgtagatatatctgcttttataatatgaagtgatggtgcattggcttttaacttgataccatattgttttccttgtttcattatttctggttcttccagactaagttcttctaaagaaggagctactactccatatccttttatcttggcatctattaaagcactttctattttatcatactcatttttaactttagatagtctagttatcagactaagcagttgataatctccttcaattttaaatccacttttttcttcaaggacattatagaataaatcttgctttgtctgtaaatcaatatttataacaccttctcctagctctacattatcaacacctgtatcttccaaaaactctaactcagaaaatccttgtataataccttctatatctcttattttacctatatctataatactttgttttaatgttgttattatgctactttttatccaatgatttctttcaagaccttcaacccattttggtaagttgattcttatttctgtaagtggaaaatcatataatacagcttccataacctcctctatatcttcttcttccatttcaaccacattcattggaagaactggaacttcatacttttcttccaattcacttctaagcatactcgtttcctcactttttggacttaacgtatttaaaaccactgcaaatggttttttaagatttttcaattcttgtataactctctcttctggttctacatagctttttctgtcaattccagtaactgaaccatctgtcaagacaactatccctattgtagaatggtcttttataacttttttagttcctatctctgctgccttttcaaatgtcatagcttcttgtgaccaaggagtggatactaatctttgttttccaccttcctcatgccctaaagctccttcaactatgtatccaacacaatctaccattcttacttttaaagatactgtgtcttttatttttatttctacaccatctgctggtacaaattttggttctactgtcattatcgttttacctgaaccactttggggtatctcatctcttgttctatcctttttaaattcattgtctatattaggtataaccaacttttccataaattttcttataaaagttgattttcctgttcttacaggtccaactactccaatatatatatccccctgagtccttttggatatatcttcgtatatgttattattcatattattcctcctatacatctaatcttattaaattatatttagagttaagggttaatattcttaaaatagaaaaataaagaccagcaatattaatttaatttacatatagaaatttgtaaatttcaatgtaaattaaattaatattgctggtccaaatagtagtgtattatattaactgactttagtagtattttcatttgacttattattcatctcaataagttctttacgtctttcttttgtcatgttcatccatataaatgtaaacaccaatccaattatggctactatagtaagaactatgaagtagtacctatatccagttacacccggaaatgcatccaatatcttccctgctgctaaaggacaaagtacttctggaagatatcctaatgtagcaactattcctatagcagttcctgatattgataatgaataattaccttcttcaagtaacgaatagtgtaaaccttgaattgcatacatagatacatatattgcaacacatccaatcaatagtatataaatcatagatgattttgttggtgtaaatattacacctaaaagacctgcaatcataagtataaatccataagatataatctttgatgaacctactttatctccaagtaatccagaagcagctgatgctactggtctacaatactgagctaatattgagattgcagatgcaaacaccacagtagctccaaatgcttcagttgaataaggcgtaaaataataaaatgacatattagctgaatatgaacaaaacattattattgttattatccatgtatgaggcatttttattactgcaaaaaaggcttctttatcaaattttgctgatacctctttttcattatcctttaatttgaaaaatactaatactccaactattacatttattgccgagtataatactataatagctgtaagaccagatttatcacttacttttgatgaaatatacccaaatagtatcaatactagagatagatgaattgcattggtaattccacgaccactttccataaatccaaaagcttttccttgttcattttcagatgctaacattctaacagcttttacaagagctggccaaaaagtaagtattgttgttattccccataaggcatggattaaaaacacaacaatatatggaggataaagtgttaatacaagaccagatattcctgtaataattaaagaacctgaaagcaattttctggctgaaatacggtctgctaaaaaaccaccaaaaaggtatgataccattgcaagtagaccataaatgcttcctaagcttcccatttgtgtatttgtaagattaaatgcttgtgcaaaagtatcataataataattctttaaatatggtaaagcatatataaatgctcctgctacaaagagtattatcaagactttgaaatttttccaaatgcttggtttatttacttcaactgacatacttcctccttatgtaaatacctgtaaattttcatgataattaattattgcttattttattgtttattcaatatttcggaatatttattaatatattaggttaatctatcaataatttatggtgagttatgagctaaaagtaaactcttttagctcaccataataattatatttttatttatactaacgtccagagttattagatatctttttttcatagttcttccatagcattaaacctgttattataacaaaaagacctcctcctatcatttcaatctcatagattatattatcttttaaagtctccataactggtgccgttgagaaaagtatgccaactacagttactacaagtaccattctggcaatattgatacaaactgaatcactttttgcaattgaatatggtctttcttcatttggtcttgtctttctaagtctaatataagatgtaaaaagcaagacatatggaaataatgctgttaatgctgtcatagtaacaagaacattgtatatattatctactgatggtaataagtttgttcctacaagaagtagactcactattatagcctgaactattactgcatttgatggtatattgtatttatttgtaacagtcaattgcttaggaaatacaccttctcttacatttccaaaaagcatctttactggacctgctatataaagtattaatgctcctagtactgataaagttattccaaatgctactattcttataaaccaacttcctatacctaaatcttgtgcaactttagctaatgcatctagtatccctgtagacgctgcaattttatctggaggaagtatcattgttattgctactgaacctaagatatagattcctcctattaaaacagccacagttaatatagctttaggaaagtttttcttagcattatccatttcggttatgaaattagcagtcgtttcagctcctgataatgcaaatattatagcagatatagaaactaatgaattggcatctatttttggtattatattttggattgtatatatcgatgctgatggagcttttttgagaataactacagacataaatgccatcactataagtaatatagcaggaattgtagaacctaatgctcctgtattcgtaaaaaattttccaaatgccatcccacgagtacttactaaggacaacagccaaaatattatgagtgaaagtgctaaaataaacatcttattgtttgataaatctggatttccaagcatatatgcaatatttatagctaaaaatgtcaagaaagaagaataccaaaatatctttgatgtccaatttagccatgacaccataaatccccacttctctccataggcttgtttaacccattctccaagtccaccatcttttggatatgttgcagccaactctgcacatataagtgatgcaggaacaaagaatataaaagcaaacaataaccaaactggtatagaaccaagacccaatccaaaactagaggcagtagatttagctatccatctaatcccaaatagtgctgatatattcataaatactaaatcccaaaatccaattttctttttcactgtaattcctccaatttcaaatttattcaaactcatacacaatgtattgatttaaatatcaagtataagttcttcaacacttcttggataattagttataattgtagcaccattcttacctactattgctgtatctgagtgtctaaatcctccaactccaggtatatatatccctggctccatagaaaataccattccttcttctaatattaattcattgtcaaatcttaaatatggctcttcatgttctgataaacctaaaccatgaccaattctatgatttgaatataactctagaccatactttgcaacaacagctcttgctgcttcatccaccattcttgctggtataccagcttttattgtatctaatccagcttgttgagcctctactgcaatcttaaacacttctttttgtctttctgttggtttacctataataaaagttctttcattttctgctctatagttttcataccaaacctgtctactatgtattactatatctcctctttgaagtatcctagtattggaatctaaatgaggttgtgctgttctatcaatccctgaacaagtccagtttgcaaatcctatatatgtatcaggataattttcagaaacatattttagtaaagcattatcccccgcaacgtcaaactccaattcactcatcccaactctaacattttctaaagacccttttattcctatatcagataggtaacctgctatcttcaaaaattctatttcttttgcatcttttacatatctcatttcaaatattttacttccaacatctttgatagcaaatgacttatcagttatatactctgaaaaacttgcagatactatatctttttctattccaacagttgttcctttagggtatttatttaaaattatatctaagtaatgtttatgtgatattccatgttctttcatttctggtatttcataatacacatatacattatcaacttttgcaacttctttagcatgtaattcttctaatccaggtactattaattctattttatcttgagttactactgttacaattggtctagaataagttattgctttaaatccactaatataaaattgattgtctggttcaaatattaaagcaatttcaatgcttttttcattcatgtactttctcaatctttctagtctcatattatttgacataatgcacctctttcttaatattcagataatttattcaatacaacaaggataaatatattattttaaaattcttaatatttttagtacttgtcgtatttgcatgtaaattaattttatttgtgattattttatcataatcatgattattttgtcaatcacgattttatttttaaaatttttttatattctagtgattttaaattatctaaaatataacgagtatacattgtattttggaatattattcttgatttatggtaagtttaatgataaaatcacgattatataaactatattgattatttgtaggtgaataaaatgacaaataaagaattacaaaagaaaaggatattgatgtatttcatagaagctgctcaaaatattatggaaaacgaaggtatagaaaatattacacttcgtaaggttgcagatatggctggatataatagttcaactctatataaatactttaaaaatttagaccatttaatatcatttgcatctataaaatattttaaagattataacttgaatatttcaagatgtatagaaaatgtcaatgatgaatataagaaatatataattatgtggaaattattttgtaagcattcttttgacaatgctcaagctttttatcaggtattttttaacttgtctagtgatgaacttagctatataacaaaacaatattatgatatgtttccagaagatttaggtattcatgatagtgacatatctttaatgattacaggagaaagtataaaggaaagaaataagatactattaaacaatcttgtagatactggatatataccagctaaagatttagacataatcaatgatataattatttctttttatcaaaatctattattcttaaaaaagaacacaggaaaaaattctggtgatgatgaattaactatgaaaatgatttcttctattgaatacataataaaacatgctaaataaaattaaaatatggctgtctcaaaatagagataagccttttttattgttgaaataataaaaatatatttaatttcatataaaaaaaagtgcctcgtaaactaaaaagttcattttgagacacccctaaaacaaatttattatttattatacaatagtttatatatcatcacctaaaactacttcttccatttcatgctttttacttctcatcattagttctattccaacttctttaggatttgaacctttatttattacagaatatatagcattagttataggcatatctatatctaatttttcagcaacatcatgtgctacttcagtagcagttatgccttctacaaccatctttacttcttttaaagtatcttctaaactcatacctttacctatgagtataccagctcttctatttctactatgcatacttgtacaagtaactattaaatctccaatacctgaaagacctgcaaaggtagacatattagctcccatagcaattccaagtctgctcatttcactaatacctcttgtcataagggcagcttttgcattatcaccataccctaatccgtcacatatcccagctccaaatgctataatattttttaatgctcctccaagttctactccaactatgtctggattcgtataaactctaagtttagggctcataaataaatcttgtatcatctgtgctatttttaaatctttagaagcaactactacggtagtaggaatatcccttgctacttcttcagcatgagatggcccagatagtattacatatggattttgtggtaattcttcttcacagacttgagataatctaagcccagtccctttttcaagacctttagctacattaacaataacttgtccttcttttataaatggttttattttttggcaagtacttcttacagcctgtgatggaactgctaaaactattaccttacaatcttttatagttttttctatatcagtacttatagttatattgtttggaaataatactcctggtaaatagtctgtattttctttagttctgtttatttttttagcttgttcctcttttcgagtccacatgctcacatcattacctttttttgcaagccctaaagctaatgcacttccccagcttccagtacctaatacacatactttctccatgtttaacaccacctgagtataatatatttactattctttcttttgaccaatttttctctctgtcccatttaataatcgctttatatttgctctgtgattatatattactgatgcagttaagaacagagctactattaaaccagctttattttttaccataatcataaatattggtgaacatcctattcctacaacagaacccaatgaaacatactttgttatagctaccaccaatataaatactgctagacacattagtgttattactggatttacagctagcattgcacctagtgaagttgcaacacctttacctcctctaaatcctaaaactgctggccaattatgacctgctacaacacatataactgccagatatccagctaaaagagtatctattccaaccaatcttgctgcaaattctgatattaaaacagccattacacctttaagaacatcacctaaaaatgtcattgctcctgctctttttccaagtgtcctaagtacatttgtcgaacctgcattaccagaaccttgagtccttatatcaaccccagcaattcgctttgcaactatgtatgaggtagatatatttcctaaaagatatgcaactacagcaataattatataactaaatatctccactgaatttcccccctttagttatattttaagatatttattttttatttttttgtctatactcaaactttatggaagttccttcaaatccaaaattttctcttatcttattctcaaggtatctttgatatgagaagtgagttaaatccttatcatttataaacaatgtaattttaggaggtctaatgtcagtttgagtcccatagtaaatttttagtcttctacctttgtcagatggtggttgatttaacattacagcttctccaattacttcattcagtgctgaagttgatattctcttagaatgttcatttgacacatattcaactgtatctagtatcttgttcattctttgattagtttttgcagaaacaaatacgattggagcatacatcataaatggaaatttttcttttatatcttttgtgtaattactcatagtcttattatctttctctattaaatcccatttattgattacaaatatgcatccttttccttcatcatgtgctatacctgcaacctttgtatcttgttctgttacaccttctaaggcatctattactatcaatactacatctgctctatctacagcactcatagctcttattacactgtatttttctattgtctcatatattttactttttcttctaagccctgctgtatctattagaagaaatttctgtccatttttttcaaaataagtatcaattgcgtctctagtagttcctgcaattggacttacaattactctttcttctccaagtatcttattgagtatagaactttttcctgcatttggtttacctgttatagctactcttattatatcttcttcatactctgtatctaatcctgctggaaaattttcaactatctcatctaataaatctccaaatcccatactattggctcctgaaactgcaaaaggcgttccaaatcccaactcataaaaatcatatatattatcaaattgactttgactatcaatcttattaaccactaagattactggtttttttgtctttctaagcaattgtgcaatttctttatcagcagctgttattccagctttaccatcaactataaaaagtattacatgtgacatgtccattgcaagcatggcttgatttctcatttgagataatattatatcttcgctatcaggttcaattcctcctgtatccactaatgtaaaatatttatctaaccactctacttcagcaaatattctatctcttgtaactccaggtgtattttcaactattgatatcctttttcctgcaaatttattaaatattgtagacttaccaacgtttggtctcccaactacagctacaactggcctacttatactcattttatttctccttccatcttttgttttctattttaaaattttatccacaaagtcttttccttcattcaaacaagggataatttttattctcataagttcttctaattgatttaattcaatattatctaagaaaatttcttcatctgcttttagcatacttcttgttatataaagagcttctcctaattctttatcttcaagttgttcttttaaatccttagctgttaaaagacctgatacagttattgtctctccaaaaaacttgtttttgatttcatatacatttacttgaagatttttaaacttgtccatcatagcatctgccatactctgtataaattcatatgcagaatgaccagtagctattgatactttcttctctctttttagaatattctcaggcaatatatttagatactcttcaatctctgtttttaacttacgtatcatacctacaccatcttcaaactgtaaaaaaccttcatattcttcatatccaggcaattcactattagatagtatataaaattcatctgataaaaatgcaaatcgagtacctaatttttcaagatatttctgttgtatttgatgtatttgctctatagttttacttgcgctcttatcattaaatatatttaattctactagattttctctatgctttgtaatcccaactggaactatcgcaacactgtttacatatggataaagttgagctagttcttttattgttctatccaattcctttccatcatttatacctggacataaaacaatttgacagttcatttctatatgagcatctgccaatctcttcattataccatataattttcctgcaaatttattgcttatcattttttgtcttaactctggattagttgtatgcacagatatatttataggacttattctatattttataatattatttatatcttcttcactcatatttgtaagtgtgacaaaatttccttgtaaaaaagataatctcgaatcatcatctttaaaataaagagtttctctcataccttctggcaattggtctataaaacaaaacatacacttatttctacagcttttagcttggtcaattatcggatttgtaaattcaacacccaaatcttcatcatagtctttttctatctcgtatatgtagacttcgccatcttttttttgtatttctacatctaaatattcatcacttagtaagaatctatactctattatatcatgtattggctgttcattcacagatataagtaaatctcctacctctatacctatttcttctgcaatactatctttataaaccttacttataatattatttactttttttacatttacttccaatattttcaccactcttttgtattcatcaatgcttattataatatattttaatatgcaatttatttatttattatattttatgatagcatttttaagcatttcatgtcataataacacattttaattctaatagtcaatataagtaaatagctataaaatagattagaacaaataatattcaaatttaagtttcttaaaaatttgaatattatttgttcttaaaaaaattttataaatttaatgttttactatgattaacgtcccatttgtcatatcatgaaccattccacctacacactttgacatcaacaatgccttattttgtaagtctttctcatcatttgcataaaatattggacaacctccaccatttttcatattcttatcaagtgtaactatagctagggtatattcatttaaacctatatccattcccatcttatgcacttcctttctttcctattttataattttttagtgataagttttttcctttagagcttgaaagtattgggcatgactttacagcttccattactttttccatattcttatctactggtaaataagcaatcattatactttcatcctctttatttcttctaggtaatggtacgaatgaaggttctccataatctccatataaacctaaccttgaatatatattgtatactattgcttgtctttgaccggagtcaaataatattcctgcattagcataatccttatttttaggaattatttgtattcctacacctctattaatatatacttctctatcactttttagacctatatttgttataccttttaaatctcccacctttagtatagattcgtccacaaaactaatttcagcaggcattacatcagctatgtctccaatactttttctagtaagaagtttttttaatataaaggctaacactaatccacaaattgaacttattaccaaactcatcccttcacttattttcgtttctgcaagtattacataatacaatcctattgttaaaaaagatgtaactatacacatataatttcttacttcataggttctagctatctcttctatgaatgcagcacctctctttacaagttgaacttcctctaaattttgcaatgtatttcttctatttgctctcacttgtctaaattgttctgctgctagagataaaaatgttatggatgtataagaacgatttataagagctggaaccaataatgctcctaatgaagaagcgacgaatgctaatataagttgagatagtaaaacatttggttgcgttggatactgtttttggtctaaattcaacattataattctagatgttataccaataataacagcaacaaaaaatactctatccattaaatcactcctaaaatatttaatttgaaattttacatgtaaatctacaaagtctttctagaaaaatcactctgctttccttttgatgtttctatgataggtgtacttttcactacatctatcatgacatctatatctttgagtattggcatatatggtataaccacagtacttttttctaaattggtcttagatatagcaacaatatcaacctcatctacatctctatctatccccatatgaataaatagattatgtattatagcttgtctttgccctatatcatttactattccaaatgcacctaaatctcttggtataacttctatggccagacattcatttctatacttttctcttgtactttctagacctatattagttattattacatcatttaccattaaaataggtccttcaaaacttatttttgcaggaactatatctgctatatctgctatactgtttcttcttaaaaatcttctaaaaatcaagccaacaatagctcctgacacaatagctaaaattgtgcaatgaaaaaagctaaggtcatactttcttgcaaaaacgatataaactatcgaagatactagtgcagaaaaaagacttatataacttctagattcatacgtagatgctatttcttcaacataagcatctccttttggtactaattcttcattatcaatattctttagtgttattctttcttgttccgcaagaccttgaaactgttgtattgctactgcaaaaaatgtcaaggctgcaaactccttatctataagtgcaggtaatgctatagcacctaacgaagctgaaagcccagatataattatctgttctaaataatcttgtggtcttgatgggtattgtttgtctgtaactcttaaaactaatcctctacataatattcctacaactaatgcaactataaaagagtgtctaaataaatttgcattcaataaactttcttccattttctcagctccttctcttatatagtttgtgcaaaaaacaaaaaaaattcccttctatttaaggaaatttttttgtaatattgtaactataaattcgctaccaatgccaagttcactttttacttttatacatccatttagtgatttgactatatgctttgttatagccaatcctaaacccgttcctcctacatccctacttcttgctttatctaccctataaaatcgttcaaatattcgttctacatcttcttttggtatccctacaccattgtctataactttaattacgattttttcttcatcttttaacactacaacttgtacaatcccattatcttgggtatactttatagcattatcaactaggtttaagaacacttgctttatatagtctttattggatagtatacttattgatttatcatcacatttatataaaacttctatatttttttcactagctgaatgttgagttatttcatatacctctttaaatacatcatatactacaacattttccataagaagagtatctttattttctacaaatgataacagcaatatatcatcaatcaacctttttaatctatctgattcgctttctattatttctaagaatctatttctagtattcacatctatattttcatttgactttagtgtttcaacaaacccacttatagatgtaagtggtgttttaagttcatgacttacatttgcaacaaaatcacttctcatattttcaagtttaacttttttagtaatatcttctatatttactatcgaacctattattacgttgttagtattctgaagataaactgggtctacctttatcttatatacgatatcatctttagtagtaatattagcagtttcattatctttagaaccaataaattgaagtatttgttttaatatttcttcttcttttattacaacattaatattatgaccttcaactaattgatttggttcactctttatcatttcttttgcttcatcatttatcagaagtatatttccatttacatctatagccaaaattccatgagatatactctttaatatagatcttaactgtaaatgtttatactgtacttcttctaaggttttatccatattctttatcatatgattaaaatttctagctaattcaccaagttctcctttggctgatatgttaagcctagcatgatattcattattacttactttttttgagacgtatataaactcttttaaatatttccttaatgttattgtatatcttacagctaatataacaatggctatggacaacataacaataaaaaaatatatactatttaaatcttccacaagataacactcctaaaatataacctttttaatctattttataccctacacctcttatagtctctatatatttttccgatttatcttcatcttctattttttttcttaaatatcttatatgaacatctactgttctagtttctccatagtattcatacccccatattttatccaaaagataatttcttgaaagtacttttcctttattttgaattaataattttaacaattcaaattccttaagagttaactctatcttttcagagcctttggtaacttcatgttttgataaatctagttttaaattgcctgtagtaagtatattgttttcttcacctaagctagtcaaattatatctccttaaaacagaactaatcctagctaacaactcttttatactaaatggcttagttatatagtcatcagcacctatttcaagcccttcaaccttgtcattttccatatttttagcagtaagcattataacaggaatattttttaagtccttatcacttcttatttttctcaaaacttctattccacttatatttggtaacatccaatctaaaagtattaaatctggtttaatttccttagcctttataaatccgtcaaatccatcatatgaataactaacttcgtaatttgacacctccaaattgaattttaatagctcaactatatgcatttcatcgtctataacaagcactttagtattcattaaaaagctcctctctattttatctgtagtaccgttcctattcgttctgatgccttattatgttttctataagagtggaatttatctgctctacaactagtgcataaatttaaatttattatattttcttttttaactccactacatctaagcatatactcattaattttccataaatctaaatagtaacttccctcttttattatatagaacttttcatcattatttgtaagaattgtgttaaatttttctactaaatcttcagacacttcatagcaacatggtccaattgatggcccaattatacatactaaatcttcaggaactgttttatagcattcagacattaattttattgttttatgacctatattactaaaagtccctctccaacctgcatgagccagtcctatggctttatttttagcatctataattgatataggtacacagtctgctgtaaacagtaaaagtggtactttttccaagtttgttataagtgcatctccatctcttcttttccctatagtatctttattgactatattaactatatctgaatgtatttgagaattactagttatattttcaaatgtcaaatcacattctttacatacttttaacatatcttctctattttttgcatctatattcttacatgttataactagatttacagaatttaatttttcatcaagttcttcacaattaccacttaaattaacatactctttaatatcttgtacattttttatatttatataatctttcatcatttgtctcctttttctatcagtatacttttaagttcatttacaaaagtatttatatctttaaattgtctatacacagaagcaaatcttacataggcaacctcatctaactctttcaatttatccattaccatctcaccgatttttttggtttcaatttcttctataaaacatttatttatttcattttcaatatgtacaacaatactttcaatctcttcaatagaaacaggtcttttttcacatgcttttagcaatccatattttatcttttctctatcaaaatattctctactattatcctttttaatgaccattaaaggagttgtttctattttctcatacgtagtaaacctctttttacatgattcacactcacgtcttcttctgatagattttaaatctgtatgtctagaatctattacctttgattctttataattacaataaggacattgcatctatattcctcctttgtttaactatatctcaaactcatctaagcttaattctgaacctatatttactattattgtatcacaacctattttaagtatatcattccaaaatataacttcttcatcccctcctcttgaaaaaaaacttctacttccatctccaaaaatggtaaatgagactaccttaccttcgtgaatatccatgtctatgtctattataaaccccatcctttttccattttttacatttataatttctttttccattatatcagaaactctaatcatattgtactcaccctttctttaaaaataaatatgtatcgaagtaaaaaaaaatgacctatataggtcatttaaattaaaataatgtttacagtccatggattacttatacatattttctcatattttttaaagcatttttttcaattcttgatacttgtgcttgagatataccgatttcatcagcaacttctatctgagttcttcctttgtaaaaccttaaatctaataccaacttttctctactatttaatttcttaatagcttctttaagtgatatttcttgcaaccaattttcatcagtatcttttttatcttgaacctgatccataacaaatattgcatctccattgtcttgatatactgggtcaaacagagatattgggtcttgtatggcatcaagtgccattacaactgattctacttctaattctaattcctttgctatttctgatactgtaggttctttagaatttgttctaattaatctttctctaacttgtagtgccttatatgctatatcttttaatgacctacttactctaattgggttattgtctcttagatatcttctaatttctcctataatcataggaacagcataagttgaaaaccttacattttggcttaaatcaaagttatctatagcttttataagaccaatacaacctatttgaaataaatcgtctatattttctcctctgttgttaaacttttttattacactcaagactaatcttaaatttcctcttacaaactgttgtctggcttcttcatcaccattttttatttgtaataaaagttccttcatttgcttatttttaagaactggaagttctgatgtattaacaccacatatttcaaccttattaacttgcatatattttcagtcctctctcaaaagtattcatctattgaaattatttacatttccaatttttttatactttttaagaagaattaatttaacattatacaaattttttcatttctttttgcaaccttgagattattttcttttcaagtctagatatgtaggactgtgatattccaagcattccagcaacttctttttgtgttttttcaatacctttatcaataagaccaaatcttaattccataatttgcttttctctgtcacttaatctgtcaagtgccataaccaacaaatctctatctatttcttcttcaattattttgtatatttcatcattttctgtacccaatacatcagataataaaagttcatttccatctaaatctatatttaaaggttcatcaaatgatacttctgttttctttttattattttttcttaagtacattaatatttcattttctatacatctcgaagcataagttgccaattttatatttttattcagtttaaaagtattaactgcttttatcaaacctatagttcctattgaaatcaaatcttctacatctatacctgtattttcaaattttctcgatatgtagactactaatctaagatttctttctattaaaattgactttacactttcatctgtttctagcttttgtaaaagctccatttcttcttctggtttcaatggaggaggaagtatatttgcccctcccatatagtatattccctttggctttattatttttaatttaatacctaacatagtaataaagcttattattctttctttcaatcgtaacattccttgtcccccttaaattttcacctaaaatccaggcaatatatttggattcattattgctccatattctctatcattaaaatttgaaataccaagtattatatttcctatcttttgctcatctacttctatatagtcagcttttaagcctattattatgcttgtcttattacttccagcatgtttataaggtattattctaactctacctgaagttttatcatctaaacttcctataatttcttgtgctttcttcatatctatatcttcataattaatatttaatagtttttctggaataaatccttctaacacactagacttaactattattacatcactttgacttattgggtcttttaacaaattaccactatctactaaagctttacagcaaaaacttttttctagtaagtttatatttatagtctttgtaagctccttaatgtacttaagcattttcaaatctttataaatgtattttaataattcacaactcacataagtacatgcaattaagaaagatatttttaagtgacttattcctgtaaaataaattataaaataagtgcttccagaaataaaaatgtttactagataaaaaactaacgctacatgaacataatcttttttgctcttgcttctaaatgaaattaaagttattatgctcatgattattattttaaatggtacagtaaatagtatattcattgatggatacaaataagcaacagaataggcacttcctaaactagcccccaataacttattttttttaggattatatcttttagtaagaatagaagtacaacttataataatataatttattactaggttttctataacatagtactcaatatacaccatgtatccccccttaaaacctttaaacatattataagatagtatgtacaaaattttatgtcacttttgatggtcgaatccaaaacaaattctatttaaaaagaacaatgatatatgtcttatactttatgtcgtcaaaagatatttttttaatgccaaacagatagacttttttgtagaatccaatatatctaggtagaagttattcgctttacttttggtatatttataaaaaaaagactacataatttaataatatatcaagtaaatcttttacttatataaaatcaaattatatagtctgtaaattcaaatataaattattgtgctagtaatccatttgcatattttgcagattcatttagtgcttgttctggagttatgtctccagctatcatcatttgaagttgtttccataaatattcatatatctctactccatgaggtccaactgtcaatggtctatacatatgtttatctcttgtcaccatttcttcaaatcttgggtctccttggtatttttcacctttagcaactggagctctaggtatttctttgtggaaagcttccattgattctttgcttaacatatactcaagaagtttaaatccaagttctttatttttacatgctgacattaatgttaaatcatctactgaagcaaaacttccaactgtcttatcttctaatgatgttacatatccccagtttaaatccgggaatgatttatcaaatgtacttgtagcagcagaggatagcattatagtaaatgcagcttttcctggtccaaatacactttcaatcatttcattactatcttttgataaagcatcttctggaatatactttttcatatcatttataaagtttgcagctttcaagccttctgcattattaaatttaactgattttaaatcatcattatatatatctccaccagcttgccataaatacggataccagttccagtttaagcttccaaatactttagaaccccaaccttgtgcaagaccccactggtcgatttttccatctccatcagtatcttttgttgctttttcacagattcttttaaaatcatcccatgtttttggaggtttttctcctaatttttctagtatatctttattgtagtacaatacgcctggattagcagcttctataggtaaaccataaataccacccatcatttttgcatcatctaagtatagataattatctgaagttcctgatttttctaaataaggtgttaaatcttctactgcacccatttctataaattgagggaacatctctgcatacatgtatcctatatctggaccttcacctgcacttattgctgttgcatatttttctgcgtagttatcccatggtactatctgaaattcaatttcacagttattttctttttcaaatttttcaaatatcggcttccatgcatctgcatcatggtctgttaatggtgcagaccatacaactaatttttctttaccctctttgcctttagaatcttctttttttgaacatcctgcaagaattgatactgatagaatccctaccataactaaagaaagaaccttttttagtttaatcatgcttaatcccctttcagactttaatttgtctttttcctcaaatgtttacatttaattcagatttaatattaacaaataagactactcttgtctaatcataaaaaactatactaactcctataactatattttttttctatacctattagatttaattcatactaaaaacttactttttaaattttatcaatatttaaaaatatttttaagtctagccacaaactaactatctaaattgaacaaaataaaaagaagtctattgacttctttataagcttacatattatcttcttcttcttaggaatgtaggtatctccatgctctcatcatcatcttcttcaattatacttgcctttttaggaggctctattttttcctcagcaattacttcttcttcaatttcttttacagcttgttttactgttgtatttaatgaagaacgtatgcttgatttaggtttagtatctaaatctaaggcaccattttgtaatccttcaaatcctgttgcgattactgtaatcattatttcatcacctaaatcttcttttatagaagctccaaatataacatttgcttctgggtcacaggattccataactaaagttgatgcctcattaacttcaaataatcctaagttaggaccacctgtaacattaagaagtactcctttagctccttgtattgatgtttctagaagtggagattgaatagcttgtcttgcagcatcaattgctctagtttcaccactagcactacctatacccatatgagcaagtcccttgtctttcattatagtagtaacatctgcaaagtccaagtttattaacccttcaactgctataaggtctgaaattgattgtataccttgttttaatacatcatctgcaactgcaaaagcatctaacattgatgtatttttttgtactatctgtaaaagtctatcatttggtatcgttataagagtatctacttttgatttaagttctgctattccaccttcagcgttcttcattcttatcttaccttcaaatgcaaaaggtttggtaactacacctactgtaagtatccccatttcttttgccaagcctgcaaccactggagcagctcctgtaccagtaccaccgcccattccggctgttacaaagaccatatcagctccttgaagtaactttactatttcatctttactctcctcagcagctcttttccctacttctggatttgctcctgctccaagtcctctagttaatttttctcctatttgaactttatattcagcttttgatgtatataaagcttgtttatctgtatttactgatataaattcaacgccttttagttgagcttctaccattctattgacagcattgtttccaccgccacctacacctattactttaatttgtgcacattcttctaattctacgtcaaagtttagcatcataaacccccttctctcatgattcaaagttatcgtatgtattaattatatcattttcttcttttattttgttaacctttaagtaacatattccacaaaaacgtaaattttcctttttaaatttcttacttatattgtcaaatattactctttaagtataaaataatttacgtatatattaaatgctctttaatttttacgttttttgttcataatattactaataatatatcgtctaattatagataagttattaaacaatctcataccaaaaactagtacagcaacatagtaaagagaaactcctaacttttctcctatataagtcaataatatagccaatatagcattacctatgaaaccagtaataaaaattacattatcatagttatcttcaaaattggattttatcgctccaaaaatagaatccattattgcaagaatagctactgacatatatatggaataatccatagaatatgtaaatggaatatagtaacctactactacaccaaatgctaatcctcctaaaacccacaacataaatcttcacctctttattttactttgaaacacaactacattacaatcctttttattaattttttttactttttctttatttttttgtatttttcgttttattttgcaaataaattcactttattcccattattttcctgaacttttatattaattccatatatatccttaagagatttagcatatgattctggagagtttatagctgcactcaataaatctatatctcctatagcttttattataaatggttgtccatatgtagtatcatttactgtaatagtagctcctgaacattttatcttacttgttgctagtactctttccccatttatagaaattgctcttgctccagccttttttaaatcatttaaaactctcaaaatatctatatcatgtataatcaaatcatttggattctgtccgtcttttaactctctctcactatccctcatagtaatagttatgcctggccctgtaacagttgaataaccacttaattctttaacttcttcaagctctttttgcataagtgtttggatagattcatttccattcttttttgcttctttatattcattcaaagtttttttgttgtttttaagagtttcttttaaattttttatttctttttttgtattttctacctcactttcaatactttcagtttgacctaatgttatgtatactctatttgggtctagtgattttatataagttgatatgaaaatgcctaatatgaatgctcctaatataactattttctttttcatactattatttcccctctgctttgtttatatcactatgaccatttatttctatattgtcttctttggtcacttttactttggcattataatatgtttctatttcccagacaataccatactttatattaagtgccgaagccaatgtatcagaatcaccaattgcttttattataattggttcttttatgacagtgtcattcatacaaagcttgtcttcttttaaatacatatatgtattaaaaactattctctggtcgtttatagatatggcacttgcttgtgctgaatttaatttatttatcattgacaataataaatcataattatatagtatactatcatttttatcagagtttcctaagtcttttgtagaatttatctcaatttttatgcctgttccttcaacatctgtatatccagctaatgtttcatatttttctatttctgacttaagtatgtcttgttctcctttattgtttttgcctctataagtctctatatctttcttcacactattaacttctgattgtagattctctttttctgtttttaaagatttaagttcttctgtaagttgctctcctcttttaaaagttgtcatccctctattttctatattaataattttaagttgtaaactaacaagaacacccaatacaacacttcctatgattatacttttatttataaatctttttttcaatatatcacttccttacaattgtctatccttctggactatacactgccaactttccatagttaagatttatagtccctccattagtatttttattttgcaggtcaatcagaattttacttaccctagatatattataatctaagttatcatcattagaaagtaagatttttatattacttcttgtaagcatttctatattgctttctttttttaagtttacataatttatttttctataaattccttcttcttttaaataatttaaagttttaaatacattctccttagttttataatttttaaattttatagatttattatcatcaacgctataatctacatctactatcaagtcttttttactttcattagaacctcttagttcttccaataaatttccttttttatctatataacaataattatcttcatcttttaatactgcaaatatttctttttcttttaaacttataattatcttattgggaagttttctttttatttccacattttctatatatggattttttataagtttatttttcatatctttaaaattgtatgcaaaaatattttcatttagatttatatttagttctttcattatatttgatttggtcaccctcttatttccaattacatctattttctttacatcaaataaatcactttttacaattatacatatacaaaaagataacataagtataaaaactaaaactatcatgacattattcgtatttaactttcttctttttttcaaatataatcaacccctttggttaataaatacacctttagagcttgtttttcctacaaaaaaattataatatttaaagtcaaatttttgcattttattacataacatccaaataaggtattaaattttataaataaatcaatatttcatcaaaataaacatagtatactacatactatttatatatttaaatctgtatacatacaaataaacccctaatttataataatttagaaaatctaatatattataaattaggggtaaatatttacttatcttttctttattcctattaccttagcttgaccttctatacttggagtcgtttctttttttatttcttttacttccttaataactttttccttttttgtttttttagaagttgacttttgtgttgaattgtatactttcattatctcatcatatataaggtctatggcttcaggcttacctatagttttacttgcatttgccatatcaactaaaagttctctatctcctaaaagtttaaatactgctgtatttaggctctctggagttagatttttttctaaaatagcaattcctgccccttgtttttctatactcttggcattatactcttgatgattttcagcagtataagctttaggtattattatagatggctttccaagagccgttatctcagctaatgaaattgctcctgcgctacctataaccaaatcacttgctgcaagtgcatttgccatatcttctaagtaaggcacaactttttggtatggtttaagatttatatcgctaatacttcccataaattcatcataatagcttttgcctgtagcaaatataaaagctatatcttcatttaccatattctttattacaagtctcattgcatcatttatttttcttgaacctccactaccaccatagcaaagtaccattcttttttcgtcacttattgatagattctttcttgcaatattttttcttgataataaaatttcttttctaactggatttcctgtaaaaactaatttatcttctgctgcctctggaaatcttttatgcgaatcttcaaaacttgtaagtacctttgtaactgttttagataaaatcttattagttacaccaggaaaagaattttgctcatgtattatggctggtattttccccatagatgcattaaataaaacaggtccactaacatatccaccagttcctataactatatctggtttaaatttcttaacaatctttcttgattgctccaaacctttaaaaagcttaaaaactctttttacattatcgaaatctatttttcgcttaaaaccttgaactgttacagtctttaattcaaatccatacttaggaactatttctgactctattcccttttccgtcccaacaaaaattatctcagcgtctggatgctcatctcttattttgtttgcaatagctatagctggatacacgtgccctccagttccaccgcctgataataaaactttcatcaaatcatcatctcctgttaattaattttgacatgctttgagatgtttaacactattcctacagctcccataaagatggtgagtgaagttcctccataacttataaatggtagtgctacacctgtagctggcattgatgatgtcgcaactgctatatttaaagctgcttgtattccaatttgtgcacctatacctataacaaccatacaagcaaatacattagaagtcttcaaagctattcttacacatctgtagactaaaactacaaatagcataataactattatacaaccaatcaatcctaactcttctcctattatagcaaatataaagtcattttgtggctctggtatataaaaatacttttgtttactctttcctaagcctagaccaaacaatccacctgaacctagtgcatatagaccttgtattacctgataccccttaccaagagggtcttgaaaaggatctaaaaatgatgtaacacgactaagtctatagggttcagcaattactaatgcagcaaataaagcagccccactccctatcatagcaaatacaattttcatatccattccagcaacaaatatcattacaaaagtaactagaattacagtacctgctgttgacaaatttggctgaagtattatcaacgcaaaaaatatccctggaactacgagaagtggtacaacaccttttgtcaaagattttattttatcataatttttttcaattaattttgcagttaatattattgtagcaaactttgcgatttctgcaggttgaaatgttaaagctcctattcccaaccatctttttgctccgtttgcttctatccctaaaggggtcaaaactaacaataataatactactgctatagctccaattgctgtagcatttttcttccaaaaactataatctattcttgatgtaataatcataactataaatccaagtacagcatatattacattcttttttagaaaatagtacgcatcattgtgtttaaatgaagattgtataaaacttgcactaaacaccataactattcctacaaatactaaaagcatagtagtgtaaaacactactccatcaaattcagtcttcatccttatgtcaatttgttttttcaaattttctttaggcatccaactaatctacctccattcttccatttaagtaagtttagaggtaagagattattttaaattgtttacattatctttgaagtcttttcctcttacttcaaaactttcatacatatcccaacttgcacaagctggtgaaagaagcactatatctccactttttgaaatttcataagaagtcttaactgcttcttccatatcttttactatatgtatgtcattaaatcctttatttttagcacaattttctatatttgatgcagtttctcctaataagaccaatgatttaacatatgactttgcagtttcaagaagttcatcaaaattacttcccttatccatcccccctgctataagtattataggtctatcataagactgtatagcttttatagtggaatctggattagttccctttgaatcatttacatatattacattgtctaaatttcttacaaactcttgtctgtgttccactcctttaaatgtcataagtacatcctttataacttctaaatcaattttgcagacatatgctattgctatagctgccatacaattttctaagttatgacctccaggtaaacttacatcatctttatttagaaatttgattttatcatctatatctattattatgtcattattttctaaatatactcctccatttacttttttagttcttgaaaagtaaattactttggcattgcatttatcagctaaagattttactacctcatcatcatagtttaacacacagaaatcctcaacagtttggttcataaatatatttgcctttgcttctatgtatttttccatagtatggtgtctatttaagtggtcctctgtaatatttaatattgcgcttactttaggtctaaattcatctatactctcaagctgaaaactgcttagttcagttactaacacagactcttcacttgaagtttctatagtatctattacaggatttcctatattaccaactacatatgtatctcgttttgctcttgaaaaaatttctcctaccaaactagttgtagttgtctttccatttgtacctgtaatccctataaaaattggattattcgatagtttaaaagctaattctacctcaccaattatatacttgcctgaattttttaatttcaatatgaatggtaggtctagtggtacacctggagacactacaaccatatctatatcatctacatcttctgggtgatgtcctaatatgtattttatgtcatttatagatttcaattcatcaagtatatttctcaatttattttcatcttttatatcatttacgattatacttgcacccaatttatctaaatgtttaattgtagatataccagtttttgcaagtcctactaataaaactttttttccttttaagtccatttttcattccccctagccctaaaatactgctattatacttatccaagctaaaacaactgttataatccaaaaaataaatacaactcttgtttctggccaaccacactgttcaaagtggtggtgtattggagccatcttaaagaatctctttcttgttgccttaaaatatccaacttgaatcaaaactgatagagcctccgcaaaataaattcctccaattataggtattataagcactgagttagttagaactgaaaatgctacaactgcacctcctaatgccattgaacctgtgtcgcccataaacactctagccggatatgaattaaatcctaagaaacctaaacatgctccaacagttgctgctgctaaaactgcgacttctgtatttccagcaatagaacttgcaaatagcataaagaatacagaaactattaatgttactcctgatgctaatccatctaatccatcagtcaagtttacagcatttactattgctacgattataaacatcattattggtatatataatattccaacatttatcacaaaatctgtaaatggtatcataagttgtgaagcacttgatgatgatgtatactgataaaaagcaacataaaaagataatgcaacttgaaggattattttttgatatgcttttagtccaagtgatctttttagctttatttttataaaatcatctaaaaagccaataaaaccaaaacctgcaatacatataagacctactgccatatcatgactaacttttactcttgtaagtccagttattagaattgcaacaatcattataattccacccatagtaggtgttccgtttttagctagatgtgtttggggtccatcatctctaactgtctgaccaaatttaaattttctaagcattggtataaatattggtcctattataattactattaaaaacgcaatcaatgcggtgtacgtaagctctgttattcctaacatcataaaactcctctcccttgtcaattaactcattagtttaagcttatttatttagatattcgactattttttctaatctcatgcctcttgagccttttactaaaatagtgtctcctgtttttactaattcatttaacttgttaaacacatcttctctattctcaaagtgatatatattggctgaattgaatcctaattgttttgcttcttctccaataaacactgaattttcacctatagttattataatatcagtattattcatagatgattttccaactaatctatgaccatactctgaaatttcacccatttctagtatatctccaagtatcgctacccttctacctttatatcttccaagtatctttaaagcagcatccatagaatctggactagcattatatgaatcattaattattgttaatttttcattttttattatgtctagtctcatttttgtccctttaaaattttttaaacctttttttatataatctaaagaaatatttagacacaaaccaactaatatagcagacattgcattatatatattatgttctcctattgttggtataaatatttcctcttttttcccatttattacacatataaatgttaaactatcctcttccatagtataactttcacaataaatatcattgtttttattaaagccaaatgtttttaacttatatacatgttctttttcttttaatgtagataaaaacttatcatctccatttacaattaaagtatttgtttcatcaaagtttgaagtaatctccatctttgctttcaaaataccctcttgtgaacccagtttttctacatgtgataatcctatattcgatatgactgcaattttaggatttactatatccactaaatattttatttcattgaatccagacatacccatctctattacagcacactcatgttctttatttagattaaataaagtcaatggaactccaaaatgattatttaagtttttttcattttttagtatatttaactttgcagatatggcagagtaaatcatatctctagtagtagtttttcccacactacctgtaacacctataaatggaatatcaaatttttctttatagtattttgaaatatctcctagagccaaagatgtatcttttacctctattaaatttatatccgaactttctaattttattccattactttcattttttataaaagttttacatccactatcatatgcaggcttcataaatgtatgcccatctaaattttctccaactatggctacaaatgcattttgggcacttgcctccctgctatctataactatatcacttacacagtcattataatctccatatattaacttcccattagttgcaagtactaactcttttattgttaagcactccattattaaactcctcctttaaaaccttagctatattctcttagcaacaaaaggcaatgtataccgttatatatacattgcctacgataactcttaactttataattatatactatatttctgtttttttgaagatgtttatgggtatatgttaattatctgttactttttagttttcaaaatatagggttatacttgagtcttcattaacttttactccaggttttgggaatatatcctttacctttgtatcttctggaagttctatatctgcatctaagtctggttttaacttcgcatcctccaatgcctttacagcatctcctatttttagatttcttacatctggcactttaacttgcttcttttcatactcagctttttcttcttctttatatactggtttaactcccaaatattttaaagagtcattcattatttctttcactattggtcctgctgtagtactaccaaatgcacttactcctgttggttcgtcaacaatagcaagaactactatttgcgggtcatcacaaggtgctattccaacaaatgaacatatatactttcctggagcatacttaccatctataactttttgagctgtacctgttttaccaccaagtctataccctggtatatatgctatctttcctccaccttcagttacaactgattctgcaatttctaacatttttttagatgtttctttagatataacacttcttactttttttggttttactgtttcagttatatttcctttattgtcagtataagattttaccactcttggttgcattaaatctccaccattagctattgatgatatagctgttataagttgtattggagttactgatatagattgaccaaatgatattgtagccaattcaactggtcctacatttttttcgttatacagtattcccttagcttctcctggtaaatctatacctgtcttatccataaggccaaatgattctatataatcatacatttttccaacacctaatctgcttcctaattcaacaaatactgggttgcaagagttttgtactgcttgtttaaattcttgtgttccatgaggtctgtaatgtctccaacatttaatctttcttcctccaacagttacactacctgtacatgtgaatttttctccatctttaattactccctcttcaagagcactggaagatgtaataagcttaaatgtagaacctggttcatatgtatcacttactgctggatttctccacatttgataatagccttttattttatctttatcattatatttttcaagttcttcttgataatatggatatattggcgttcttgagtcattagggtcataatctggttttgatgctaaagcaagtatatcacctgttttagggttcatagctattgcagtaaccttttttgcattatttaactcataagctttctgtactgctttttcagtatagtgttgaattacttcatctatagacaacacaagaccattaccttgtacaggctcataatatttttccattccttgtggtatttctcttcctgaggcatcagtacttactataagttttccaggctttccttttaactttttatcatattgcatttctacaccagatatacctgttgcatctgaagaagtatgtcctaacacatatggcgcaaaattcccatatgggtaatatctttgattatcttctgctacccatattccacttaatttagcatctcttatttgacttgccttatcatcatctatccatctttttacttttacaagagccatattttttttgcttattaaagcgtaaatatctttataatcttcatccaaaatctcagctaccttttcagctgcttcttttttatcttctacttccacaggtttacaccaaacagtatacttagttacacttactgctaattctttcatatttctatcatatatagttcctcttttgggttctattggtatatctcttgtttgttgttctagtgcttttgtactcaaccaatttcccttcataagttgtaggtacccagtcctaataacaaggcaaaaaaacaatgcacatgctagaataagaacgagtaccagccttttcttacttatcctctttacttttctcaaatctattccccctagttatccacatctatatactttatttgtccatcttttggatagtccatattgagcaattccttagcctttagctcaatttcttttattgatgttttttcagtttcttttgcctttagttcctctaatactatctctttttttcttaaatctttttgtaaataatagatatcgtacttcatttccgagatttttgaataaccacatagattcaatattattactgaaaaaattgcaatcagtaaaatgcatttagctcctatttttttcttatttctctttttataattattcttttttttatttttatattcatttagattatgtattttataattttttttcaaattctcaccccgatagtatatagtttaaattttcctctatactatatttgttattaatcatatttcttcctctaaaatttcatcgctaaattaatacactattacacaatctaattgtatttttttctatacacaacaaaaacctataaattcacttatacttttatatgaatctataggttagatattaatttctatttatttttatcacttctagtatttttagataatttcttccataaatataatatgtaactaactatctactctctgattcctaagttctccattatattacttaataccatctatatctatatttttatatctaaattttcattatatatctcaataacaaagaacatttcttatagtgttaattgttttttaattgctttaccagttcaacaaaatatataatactttttaattaattatagtaatcttattttatatataagattattctttagccttataactacttatattttttctgctactcttagcttagcacttcttgaacgtggatttacttctatttcttcctcactaggtaatataggttttctagttattattttcacctcagattctttatcacattggcatataggtaaatgttgtggacatatacaatctgatgctaaatgcttaaatgcatttttcactattctatcttctaatgaatggaatgttattatacatattcttccacctttattcattatagaagaagcatcatttatcatctttgtaattactccaagttcattatttacttctattcgtattgcctgaaaagttcttttagctgggtgaggtccatctattctagctttcttagggatagcttttttaattatatctactaattttcctgtagtttctattggtttgtttgctctttcttcaactataaatttagctatacgcttagcccagttatcttctccataatcttttattatcttagttaattcatcttctgtataagtatttacaacatcatatgcagaaaactcacacctaacatccattctcatatcaagtggtgcatcttgcatataagaaaatcctctatcagcttcatcaagttgatgagatgaaactcctaaatcagctaatacaccatcaattttgtaaactcctattttttctaattcctcttttatattttcaaaattgctgtgaacaaacttcactctactttcatattcactcaatctctcttttgctgtgcttatagcatttttatcttggtcaaaccctataaataatcccttatctgacagtttttttactatttctttagaatgtcctgctcctcccatagtacagtcaacatacacgccatctggctttatatttaaattctctatacactcatttaaaagaactgatacatgatgaaattccatagttacctcccttaaattcactttttaaactattcttcactaatattatgtttatttttctttgataaataaacatgtgcaattatgccaccaataactccaattagacttataacttgtgccattctaagtggtcctaacattaaactatctgttcttaatccctctataaaaaatcttcctattgaatataaagttatataagtaactataacttgaccttcatattttttattttttctaaatagtaataaaactataaatattccaaaatcccatatggactcatataaaaaagttggatgtacctttactccatcaaccattattccccaaggtaaattggtagcacctccatgtgcttctccattaataaaatttccccatcttccaatagcttgtgctaaaggcattccaagtataactgtatcagccatttttaagaagttaatatttttaatcttagtgtatatataaccagctaatattccaccaattaaccctccatgtatagcaagtccaccacctctaaaattaaaaatttgagacatattttgagcatagtaactccaattaaatacaacataatagattcttgcacagattagtccaactggaattgctattatagctatatttaatacatcatcatctttaattcccactctttttgcttcttttattgctattaaagttcctaaaatcattccacatgccataagtattccataccacatgatgtctatgccaaacagtgtaaatgctactctatccataacgtcacctctttgtattaattgaaaatatttccaaagcaatatgctataattacaattaattgtaattatactaaattatgataacacattaatgttaattctacaaaaaatattaaaatttattctacaaatccctacactatattatactaatataattactataaaattttttaaactgaatctctcatgactaaagttacaagtgtacatagatattttttaatcaaaaagattgatgcatatatacatcaacctcttctattccttatctatagctcttaaatttttacctcaatttatataaatatattttataaatttgttttaccaaaataaacatttaaaaacataaataatacttaattagttattcttattatgattaagtttctatttaggttctacaatagaaataacacaatactcttctttaaaatgctcttttaatctttcttcaacttcctcaaaagtaatatctttaataacatctaaataatccaatagatttatatccttaaaaacataagatataaaactattacctataaagtttatagaatcaaagcacttaataaatgaccctatttttttctttttagttctctcaaactcttcttttgataatccttctttttttgatttttctatataatcaagaattatttcttttacttttttaggctctttagaatctccagctattatgctaaaagcataatccacttgagacgaaaatccagctccaaaattttcatttattaaaccttgcatatacaaatcttcatagagcttacttccttttttaaataacatccctacaagtatatcagttacaatctctttacgtaaaagttctttcccttttaaaccaacattactatctttaaaacctatgttgaacataggcatagatatagggaatttttctataacctctttttcttttacactttctggttcttctggataaaatctttctatactcttagagagtttgtctactttgtaattgtttgactttttagttacatctataactttttctacatctaagtcaccaacaacaaataaagccatatttcctggattatagaaagtattataacatttatatagctcttccttagttatcttatatatactatcaacagtacctgctatatcaattctagcaggataatttacatacattgccttcaagcaattaaagtatacattccaatcagggtcatcattgtacatttttatctcttgtgctattatacctttttccttttcaacattttcatctgtaaaataaggtgtttgaacatagtcaattagatgttctaaactctcataaaaattttcagtagcagaaaataagtaggctgtcattgtaaaattagtaaatgcatttgcatttactcctaattttgaaaatttatcaaatgcatctcctccatcaggttgctcaaacatcttatgctctagaaaatgtgcaataccttcattcactctaattttcttatcttctccaattggtacaaattctaagtcatttgaaccataattagtagccaaaatagcatactttttcataaaaccccttttaggcataaaatatacatctaatccattttgcaatttctcataataaacttcttctttcaatatatcattaactattttttccatagacatctcctccattaatttctcaagaagtatacagtatcaagctctatattttttatagcttcaactatatctttttttgtaaccttttctatactagatattatgtcttgtacttcagaatttgtctttgccatagactgagagaaaacaaaatcagacataccacctatattatcagttatagatttcatagaattaactaaagcaagtttactgttttctaattcttcatcagatatatcacctgcttttacactttctacttgtttttttatcaattctacagctttatcataatctttagtttctataccagatgatataaacatgatacttttatacttctctattgaagagaatatatagtaacataaactttctttttctcttacattaacaaataatttagagtgtggaccaccacctaagacattgctcccaactactaaagcataatatttatctatgtctgcataatccacatttgctctataacccataactaacttaccttgagttatttccatttgttcatctataacttttacctcatccacattttttataaaatctgctcttggtatatttataatttcttctctttcaaattttagatttttacttattatatctacaactttatcttcatcaaaattaccttctacaactatatctataggtgatgttttaagtatgtttttataatgttcatataactctcttgaagttatactatctatttcatcttcataaccaaattcacttacactatatctctctcctttacacatagcctcaatacatttatcttgcgcatattcctttttatcatttattattgattgtatcttttctcttaaattctctttttcaatatttaaatattcttctttaaacccaccatctacaacaagcgtattatttattacttcattaaaaaattctactacttcttcaaatatactctcatctaaatacttttcacttatgttaattactttaaaactcaatacttgacgttctccacgttttacagcatcagctcccatagatgaaccatataaatcatctaatttattggatattgctctagcactaggatatttagcgcttccacttgctattattgatggtattagagcattttttgtagtttctttttcatccaatagtctctgaacatataaacttataagattcgatttaaacttttctgtttttatcaaagtaagattaatattattacctaaatttattatttttttagtattaaccatatgtacctcctatttttatttaaacatcaattttaaaattgaaatttatttattttttaattatatatactcacatataaaaaccttctatttaattatatcctttttattattttctaaaagcaatatttttatttaaattaaatgcaaatattatttaaatcaatatgctttaaagtctagtttacaagcttgatatatatgatgtataatcaatatgtatgtctataattaaaacaattttgcaatcctatagattgattgtttaaagttatataaagaatataaaaaagaataagagagaggacgattaatatgaaattaggtatagttggtttgccaaatgtaggtaaaagcacactatttaacgcaataactcaagcaggtgcagaatctgcaaattaccctttttgtacaatagacccaaatgtgggagttgtatctgttccagatgaaagattaaacaaactacaagaattatataattctgaaaaaatagttcctactgctatagaattttgtgatatagcaggtttagttagaggtgcttctaaaggagaaggtttaggaaataaattcttatcacatataagagaagttgatgcaatagttcatgttgttagatgttttgaggatgaaaatgttgtacatgtagatggctctgtagacccacttcgcgatatagaaactataaacttagaattaattttctcagatatagagattcttgaaagaagaattaataaaactcaaaaagctgctaaggctgataaaactttaggttctgaacttgatttattaaaatcaataatgtctactttagaagaaagtaagtgtgtaagaactatggaatttacagaagatgaacaaacattcgtaaattcattggatttacttacatctaagcctgtaatatatgcttcaaatgtatcagaagatgatttagctgataatggagaaaataataaatatgttcaacaagttaaagcatttgcagaaacagaagatgccgaagttgttgtagtatgtgcacaaatagaagcagaaatttctgaacttgattctgctgaagaaaagaaagagtttttagaaacattaggtcttgaacaatcagggcttgataagcttataaaatcttcttatgctttacttggtttaatttcattcttaactgctggtccaaaagaagttagagcatggactataaaagttggaagtaaagctcctcaggcaggaggaaaaatacattctgatatagaaagaggatttatcagagcagaaacaatagcctttaatgatttggttgagcatggtactatggctgctgctaaagaaaaagggttggttaaattagaaggtaaagaatacatagttaaagatggagatgtaatattatttagatttaatgtttaaaatgattaatcatatacactttgactattatatataataactaaaaaactaagattataataatacaatattatcttataataattatatagaatttaaaaataaaagaagagtatttcaaatgatttgtataaattattatgaaaaactctttttttgatataataaaattacttacatatataacatttaaatttataaattatctttttattttttaaaatatgtataacacacctatagaaattactattattactatctaaagtattttgctataatcccatatactcttacctcaaaaacattcaaatggaaaaaatactacatattaataaactttgcccaataattcctaaaataatatcctaacaatgatttatgtttttataatagtatatttttacataaaaaagtgaacattgattaacaaagttcacttttttataaatttttatgttataattcacaattttatttaatttgtttcttttctatttaaactatatctatctaatattaatttttcatattcttctattggcattggtctagcaaataaaaatccttgggccatatcacaacctataaaccttaaaaactctgcttgctctacagtttcaacaccttctgaaacaacttttatatcaagttgctttgccatttgaacaatacttgaaactacaatttgactcttttttgcatttcccactgttataaagaattgcctatctaatttcaatacatcaattggcatatctttaagcatatttaaagaagaataaccagaaccaaaatcatccatagaaattttaaatccaacagatttcaaagtttgcattattttaaataatatttttgtattgtcaaatattgcactttctgtcaattcaatctcaattaaatttggttcaatttcatattcttttgttattctttcaagctcagaaataaaacctggattctcaagatgtactcttgataagtttattgatataggaaatgtggggaaattttcattttcccaacgtttaaaatttttacaaacttgggcaaatacaaacatatccaattctgttataaaaccatttttctcaaaaataggaataaatacacctggacttattagaccttttttgggatgttgccaacgtacaagcgcttcagcacctacaattttagtagttgataaatcaaccttaggctgtaaataaactttaaattgttcattttttaaagcatcatgcatttcttgttcaatatcacgttcttctatgagagtttcttttaaattttcagcataaatctcataaacttttaaatattttctttttactgtagtttttgcaatcatagctttgtcaagacaggtagaaatatttgtttctccctcttcaacaaaatatacacctatggatggaattaaattgagttctactcccaaacttgtttttatcattgacaattttttacgtataagttcacatatttctataattgactctctattatttttcttttcaaatattatagcaaaattgtcatttgaaattcttgaaaatacagattgctctttaaatatattcttaattatctctgctatttcctttaatactctatctccttcttcatacccaaacctatcatttactagcttaaacttatctatatcaaaataaattaaaactagattctttttctcatgagaggataaaaattttcctccttcaagattaaatttatttgaattgccaatacctgtaacgttatctttaaaagcaaattcttccaatttttccttactctttttatgtataaatagtatataaattgttaatgccgtaaagattataatcaacactacacatgctgataatgtaagttttataatagcgtatgatttctcagatatagcagttttaggaacttcagaaaaaagataccaatcattgattcctattggggcataacttaaataatatccttttccaaacatactataacttaatgaacctgatttaaagttttttatatttgacttcatattattgatactagattttgatattgaatcacttctgccaatgtaagaaaataaattttctttagtagagttggcgtttttgctgcttggatttaaaacaatattaccattacttctagctatataagaatatccttttccattaaatgtaggtacagaaagtattttttcatacaacttcgtactatgtgtggcaaatataactcctttaacctcattatctttataaattggcacagaatatacattaatattactattggtatttttatcatcttctattacatcttttaatttttctgttataaccacttctccttgcattgattttaagaaataatctcttttagagaagtcttctatataaccatctgtagtgtatgctgtaccatttggtaaaataactcccattcttttaaatgaactattaatagcttgtctttttagtatagaaaggatattatctacttcaaaagactcttctccctcaataaatattgaaattgactctagtaactttatatctccattaatttgtttttttaacacattgacgctttgatttgctatttctgaaagatattgattcgtttcttcacctaatgtcttattcaaccttgaaccataaatcaaacaggaaattgtaattactaagatacttatgacagcaattatggacaaaccatacctattattttttgcatcacttaacattatgcttcctgcctttctcgaatctatgtatgtataatcattatcttatgacaattattgtaaacattttataataatacttatttttccatatttactgtaattatacaaaattataaactttattacaacaataaattaattaatatagatattagggtttatattattgcattatctattttacaatcatttacatataaaaaaatgtaatatcaaagtgaaacttgatattacatttttgttcttgtattttgtttaatttttatgctacattttacttaaacactcatttgcaacttctttatcatcaaaatgatgcttaactttacctataatttgataagtttcatgtcccttacctgttataattacaacatcatccttttttgccatacttatagcttctgctatagcttgttctctatcaacaacaacatggtaattttcttttttcttgtcaattccttcaagtatatcttttattattgcctctggttcttcagttcttggattatcagaagttataatacataaatcagaatatttttgtccaattgctcccatcaaaggtctcttttcagtatctctatctccaccacatccaaacacagaaattatttttccttctgcaaattgttgagttgtctttagtacattttcaagtgcatcaggagtatgagcatagtctacaattacacttatacctttatcatttggaactgtttcaaaccttcctgatactccattagaaagtctaagaccttctttatatattggtttaggtatgccaagtacatagcaagcagctataactgctaaagtattatatactgtaaacattcctggaactggtataaatattacttcttcatatgaaggtgttattaatctataagatactccatccgaatctgattttatatctctagccataaaatcagccttagtatcaacaccataagtgtaacaaggtacatttataccttttatattttcatatatcttttttccaccttcatcatctatgtttattatatttgccatagtagtcttaaaaaataatttttcttttgcttttctataatcctctaaatctttatgaaaatctaaatggtctggtgttaaatttgtaaatatgcctagtttaaagtctgtttcatcaactctatttaatgccaatgaatgtgatgaaacttccatcgcacagtagtcacatccattatccaacatattattaaaatgatattgtaaatctatactttctggagttgttgaattggaaacaatgtctttttctccgtcaaaaatttttatagttcctataagtccaactttattcttatttaaagttaatatctcatttagtatagtagttatactagtttttccattagtacctgtaactcctataacgttaaatttctgagatggatgattataaaaattatcagctacttttgccatatcttttcttgtatcttttacctttataaatgtacatccttttatttctacatcttcttcaacaagaaatgcacttgctcccttttctatggcatcttttatatacttatgaccatctgacacaaatccttttatacatataaataatgtaccttttgtaacctttcttgaattatattgtacattattaatatctatatttaattcacccttgacattgattatatccaacccctgtataatatcatttaatttcataaatgctttcctccctttaaactctttctgctaaaattacactacatataatattatattaagaattttttactatgtgaatggttaaaaatgcttgaaatattgcaaaaaatgctctataattttctataatataactgaggaaaggtcttctataaaaactatggataataaaatcgggtacttaaacgataactttaaaatatttaatattagagataaaaaagatatacaatttgaataccataatcatgattttaataagataattatatttataaatggaaatgtaacttattttgttgatggtattccctataaactaaagccttgggatatactctttatcagcaataatgaaatccataaaccagttatagattcaaatgtcttttatgagagaattgcaatatggattagcccagaatttatgaaaaaaaatagtgatgctactagtgacttagaaaaatgttttaaaatagctacggagaataaatgcaatagattgcgtttaaatatacatgatattgaatctattaagagttttattgagcaaataaatatttccgaatccaatactgaatttggaaatgaaatattgagaaatgcattatttatacaacttatgatattcttaaacagaattttcctaaaaaatgaaaatatggaatcaacagaagacgttttttatgatgaaactattaagaaagtattaaactatataaattcaaatatagatgataagctttcaatagatagcatatcgtctgaattttttataagtaagtattatcttatgagaaaatttaaatctcatactggaacgtctatacacaattatatagttcaaaaaagattaattttagcaaagtcactaataaccaatggttaccttatgagtgaagtttgtaataaatgtggattcaacgattattctagttttgtaagggcatttaaaaaaaactacggtgtatctcctaaaaattatataaacaataaaaatcctttagatattactcttttagatgaatagataatttatgtaaattttattttaataaaaacttgaagtattagtgtatttatcttactaatacctcaagttttttaatgttttaaaatatatcaaaatataatgatatatatttctattacttaaaatatatattaaataaattgcatgttaactgaacctatttatatatttattaaatctcacataacttttagttatactatcatatagctatcctattttttcaatatcatatcttaatatacttactctgttctcctcttttgctgtagttattccttttttaatgcttaatttctgattttgttctaaattcgtaaatactacaggacttattgttgatagacaatttttttcaatatattctaagtccattttaactaatttttctcctgcttttacttcatctcctacattcacaaatacttcaaatccatttccttctaaatttacagtttctatccctaaatgtataagtatttctactccactttttttggattttattattattgcatgcttagttggaaatataactccaatagttccatcaactggtgaataaatcaatccatcactagatttaattgcaaatccatcccccatcagtttacttgaaaatacagaatctggcacttcttctatatctaatatctctccatttgttaatgaatcaatcttttctactaaagcattttccatattggcaacttccatattttttttcactttatttttatcaacatttttagtaacagtactttcaacctttgtttttccctctattatatcttttatatcagactttattgaatccgattttggtccaaatatagcttgaacattgttgccaataaccataacacctgctgctccaagtaatttcaatttttctttatctactttatttatatcatttacaaccaatctaagtcttgttatacacgcatctaggctctttaagttgtctttatttcctaaagcaattaaaatctctgatgctaattcattcttagacatttcaatgacttcagcgttagtttctgactcatcttctcttcctggtgtctttaaattaaattttcttatcataaatctaaatacactatagtataatactgcaaaaccaatacctaccaagatagccaagtaccatggagttctattaggaagaacaccaaataataagaaatctattaatcctcctgaaaatgtgaatccaattttaactcctaataattgcataattgcgtatgataaacctgaaaataaacaatgtattgcaaataatactggtgcaacaaataaaaacgcaaactctattggctcggttattcctgttaaaaaagaggttaatgctgctgatgccattatacctgctacaaattttttcttttctggctttgcttcatgcaccatagcaagagctgctgctggaagaccaaacatcataaatggaaatgcacctgtcataaaagtacctgctgtgaaatttactccatctttaagttgagcaaagaatatcttttggtcacccattacaagctcaccagctttatttacatattctccaaattgataccaaaatggattatggaaaacatgatgcaaaccaaatggtattaatagtctttccaaagaaccttccataaatgctgctagtgtttgatttgcttctataacattttttgagaaactaagtaatccctcttgtattggaggccaaataaaagacaatataattcctattgctatagcaactaatgaagtaacgattggtacaaatcttttacctgcaaaaaaacctagatactgaggtaattcaattttataaaactttttataaagataagcagccactatccctataataataccaccaaatacccctgtttgaattgttggtattccaacaatacttgcatacatagaattgtctaccatatcttctgtaacacccgccataacacccatagatgtattgagaattaaaaaacctactatggctgccaatgctgcaacaccttctccttcagttaaaccaacagctaccccaactgcaaatataagtggtaagttattaaatataatttgacctgaactttccattatacttattataagttgaaatgtaggattcgccaaagctggaaaatgagacaacaatgcgtctcctgctaaagcattactcacgccaagtaatatacctgctgcaggaagtaatgcaactggtagcattagagattttcctactttttgtaaaacaccaaatacttttttcatttacttttctctccttattattttatatttttttaaataaaaaagacttaagtttataaaaagttacattagtatacttaattctaaaattaaacttatgttaatataaataaacctatattaacctaatttcagaattaaaaataaactattataatttttttataaacataagtcttgcctgcattatcagtaacaatcttaatgttttaaaattattattttatattaaattttaaataatatattaaaattaaacataatatattaaacctatacattctgtattaaactactctttattataaattcagtacagatataactcttttgatatgtaatgttaaataaagtagttcatcttgacttacatagtaatcataattcttttctacatgagtttttattttatatgcacaatcataatccttttcatactttactttaattatatctataatttcattatttgtatcattgattttttctttttttactaatcgttttgcaaagaattttaaatgagtcaaaagcctatcataatttatatcatcttctttaaattcaactctataataatatcttataatatttagtatgtcttttacaattttagtaattaacagtgattcctttgaacttcccttatagtttgaatttactatatgcattgctataaaaccagcttcatctactggaaatttcacatcaaattctttatttatataatctacagcccatttaccaatctcatattcttttttatgtattctttttatctcatgtagtaaatcattctttatagttatattttcatgatatcttttaattgcaaatgcaatatggtcagtaagtgctacataaatatattcataaagcttagtattcaaattctcctctgcataagcaattatttcagtactaatctcaaaaaatttctcatcaacctggcttgctagtttgctaattttatctaaaaagctttcatcttgtattacaaaagttctttcaattttacttttatctatttcttgacctttctttttttgaaacccaatcccacatcctgttagtattaattctttttttatattttcatctaaaactaatacaacattattattataaatttgttgaataatcataatcaatatctctcccaaaatacaatttcccttattcataaaaaaatacctaaattaagatacaattcacctgtataccttaacctaggtattgcctgcttaccagtaacaatccagcttgttaattcttatatattgtattcaatttatggttttattctattataaataaatatatatgtcaagtaaattattgaaaactatttcctattttttagtattatttttaacatcaaaaatcaaattttattccattatatttatgattctatcatcatcatttaataaagattcaccttcaagtatactcatcatatttttaggaaaatttaatccttgtgtgattgattttactgctactaaatcagttgaagatattactgctgccaaagcaagtgaaacagataatggcatcctaggaataagaaaatgtataaagattccacctgcaaacacggttatcaaaactaaaccaaatgcaagaagcaaaattggttttctaagctctagtaactcttttcttgatacattttgtccttcactgaataataatggagctatgatacatattacaaatatttctggattaaatgaaaatgataatttaaacggcaaaatagacaatataatccctagtacaatttgatatattgcaagaggaatattactccactttttgctaaatacagttgaaatctttgtacaaaccaataatcccaacaatgttactaaagttgacataactacctctcttttcaataataatattataaattaaacttatatatcaactaacttaatattaacaacatgaaatcccatcttaatcaaaaaaattttcagtttattctattattcttattatatacatcaaatttaatttttgaaatatctatactagatggcatgcaacaaaatgatttcttgatatttcttttaaaactggaatctcttttttgcatatttccttacaataagggcatcttgtatgaaacttacatccacttggtggatttgttggagatggtatgtctccttttaatataattctatttttcttaattgtagggtcttgtactggtactgcgctcataagtgctcttgtatatggatgttgagaatgtaagtaaagttctcctttagttgcaatttctattatagaacctagatacataacacaaactctatgtgcaatatgatttactacactcaaatcatgagatataaataaatatgagagtttatatttatcctgtaaatccataagtaaatttataatttgagattgaatagaaacatctagtgcagaaacaggttcatcacaaactataaattctggatttaatgctaatgctcttgctatacctatcctctgtctttgacctccagaaaactcatctggttttctatttaaatggtacttagaaagaccacaactttctacaacatttaatatattatcttttatttcattctttggcactaaattatgttctataactgcctctgatattatttgttccacatttaatcttggatttaatgaactatatgggtcttgaaatatcatttgcattttgggtcttaactttctaagttcttccttctctaacttatatatatctacaccattaaattcaactttaccttcagttttttcaattaatctaaggatggttcttcctgcagttgattttccacatcccgattctccaactatagccaaagtttctcctttttttaaatcaaaagaaattccatctactgcctttacacatttaatttccttatcaaataatccagatttaacttcaaagtactttttaagaccttctacttttaataaactctcttcttttttcaattatatctcctcctttttatataaccaacatgcaatactatgaccactattcaattctattaaaggaggtatctgagttctacatttatcacatactttttcacatctatcactaaaataacatgaatctggtattccaattggatttggtacttgtcctggaatcgaatacaatcttttatctttgttttttccaagaacaggctttgattttagaagtccaatagtataaggatgttttggatttttaaataattcaacaacctctgccacttctataattttaccagcatacatcactaatactttgtcacacatttctgcaactactcccaaatcatgtgtgatcatcattatagatgtgtttaatttttcttttatatttttcattatatctaaaatctgagcttgaatagtaacatctaaagctgttgttggttcatcagctataagtaattttggattacatgataaagccatagctatcattattcgttgtctcataccacctgataattcatgtggatatgaattatatatttcttcagctcttggtatttctaccagttttatcatatcgattacctttttcttagcttcttcctttgataaatcttgatgtatcataataccttcaatgatttgacttccaacagtgaacgctgggtttaaagatgtcattggttcttgaaaaatcattgatatctcattccctcttattaccataagttcatcttcattcatctttaaaatgtctttgcctcgaaagattatttctccaccttctatttttgatgttggaagtaacttcatcaaagacatggctgttacagacttaccacatcctgattctccaactattccaatagtttcaccttcatttatattaaaacttacttcatttacactctttacaatccctttatctgtatgaaaataaacttttaaatctttaacctcaattagtgctttactcattattttctcctctcagcaaaattacttaaaataacatacaccttttgattgtattttataaaaatttaaattacaacattttcttacattttattatttttttctattaattataataatataatagttaatttctatatatattgatttaataatgattactattatacaatgaaaaatatgtgttaaatattattttatggaggttttataagaatatgaaatttaaaaaattggcatcattaatcttagtttcatcattaatgcttacatttacagcctgtgcttccaatgataaagacaagtctagtggaagcaaatctggtggaactgttgtaatacctatggcaagtgacccagatataatcaatggagcttttgcaaacgttaaagaagactctcttgcatcaaatatagtttatgctcctctttatacttatgaaaaagggaatttagtaaattatttagcagaaaaagtagattttaaagatagtaaggaattaactataaaattaaaatccaatttaaaatggcatgatggaaaaccaataactgctgaagatgtcttatttacatttaatacagttttagacgaaaaacaaaattcaccatcaagacaatacttattggtgggtgaaaaaccagttaaagtagaaaaaattgatgatttaacagttaagattactttaccaactgcaagtgaatctttcttatatggtatatctaaaatttctccaataccaaaacatgtatttgaaggagaatcaaatatagctaagtcagaaaaaaataataatccagttggttctggtgcattcaagtttaaggaatggaaaaaaggtgaaagcatagtatttgaaaagaatgcagattattttggtggagaacctaaggcagattctatagcgctaaaaataattcctaatgaagcatctcaagaagcagctttaaataatggcgaaatttcacttatgaagacatctgctgaaggatatgaaaaggcaaaatcaaactcaaacttacaaacttatacttatagtgaagaaagattaaactacattgtatttaaccaaaatatatcaaacatggctaacaaagaagtaagacaagccttatcatatgccttaaatagaaatgaaatgatagaatcagcatatggaaaagaaggttctgtacctgctaaatctatattagttccagaagcagacttctatacagaagaaggtgttgaaggatatgaccaagatacaaataaggctaaagacttattggataaaagtggtgttaaaattgataaattaaaaataggttataacacaggtagatttgggcataaaaactatgccttagtagctcaacaagagttgaaaaaaattggtatagaagctgaaatagttccttatgaaagtaaggcattctttaatatactatttagtaatagcactgaatgtgatatgtatgtaaatggttatgcttggggattagaaccaaacccatatagaggtatgtttgaaactggtcaatattgcaaccaaactaaatattctaatgctgaaatagatgctttatgggaaaaaggatttactgagttaaacaaggaaaaacgtaaagaaatatacaaacaaatacaacaggatatatctaaggatgcacctatttacactatagattatgaacaaaatttaatggcagctcaaaaaaatctaaaaggaataaaagatgctaaaccatctcctgcaatattatttgaagattggtctaaactgtatgtagaataattgatgtaaaattttatattattaattagaaaaggagatgtctaaaaataatattgttttattattttaaaacgagacatctcttttaattaggagaatttacttatgttaaaattaatattgaatagagtaaaagttttaatacctatgttaatcttaatatctatattatcatttggacttttagaattagctcctggtgacccagcagatgcatatataaatcctttaatgtcttcacaggatattgaaaatataagggttaatatggggcttgataaaccagtatatataagatatttaaactggttgaaaaacactttaagtggaaacttaggtatttcttatataaaccatatgcccgttacagaacaaattatggaaaaaatgggaaatacatttattcttatgggtacttctttgatattttcaatattggtagctatacctcttggaatatttttagctgtaaataaaaattcaataactagtaaagtatcatctgtttttaattatataggtgtttctatcccttctttttggataggtatgatactcatttcaattttttcagttaaacttaacattttcccatcaggaggtatgcatactattggaaatgatagtattggagatttagtaaaacatttagttttgcctgtaataactttaggtctatataatactgctatttttacaaattatgtagaagctagtgtaaatgaacaattaaaaaaacaatatgttattacagcaagagcaaaaggattatcagaaaaagtcatactatttaaacatgtcttgaaaaattcactgacatcattggttacaatcctaggcatgagtatacaaaaattagtcactggtgcatttgttacagaagtagttttctcttggccaggtatgggaagattaatgattgattcaattttttcaagagattatactgtaattatggcaataactatgttatcagcactatttttaattttaggtaatttagttgctgatatactatacttattaattgaccctaaaataaaatctagcaaaggaggattctagttgtgtttacaagtatcttaaaaaaattaaaaaaagataaatcctttgcttttgcatgtattactcttagcataataatcatattaattatagcttcttttatattaaatatagactctaatgcaattgatactacttctaaacttcaagaacctagcttaaagcatatctttggtacagacgaacttggtagagattacttctctagagctctttatggtggaaggatttcacttagtgttggtattttatcaatgcttatctctgtagtatttggtactgctgtaggtgttattagtggatatattggaggtaagctagaccaattcttgatgagattagtagatatgcttatgagtataccaagtttcttagttttgattgtattaaatacttatctaacacctaaagtttccactattatactaattattggattcttaagttggatggaagtttcaagaattgtacgtggcgaaacattaaaaataaaggaaaatgaatactgtttagctgctaaagctactggtatcaagactagaaatatactattaagacatatagttttaaacttaaaagagactattgtagtcgctggttcgttaaatattgctaatgctatcttaactgaatccgctcttagttttttaggtcttggaatccaattacctcttgcatcatggggtaatatgcttcaagatgctcaaagacatatttttgacaagttatatttagctgtatttccaggattacttatatttttaacagtcataagtttgactataataagcaaaaaattttctagtaatacttaacaaattttatatagaaaataaaaacagtgattatctaaagatatacactgtttttatttttcgtttaaaaaatacatattttgtatattataactttaaatactactctaccatgttatgtaaagcctattattgctctcaaacatatagatgaaaaactaatagtttattgtaataaaaattgatttatttatttgttattttaataacatttttaagagttctttttactaaagaaatctataataaatttaaatacatgttggtctacatggctataacgttcttttttaggtctacatagtataactttccatgtaataggatgattaaaaggcttttctataattttgctattttcaaaaaaatcatgaactggtgatggtaaaattgttataaaatcagaatttgtggttgatagcaacaaaaaatcccatgaaccagacattatatatctttttaacttaacattttcatcagtaaatttttgcattagcttatgatgtatcataaaagtaggattaaatattgcaagtaattgctcattcaaatcgttccaatctatcttatccttcttagcaagtggatgatttatatttaaaaatgctgtaagttcatcttcttgaagcacatgttcagttactacacttttatcaattttatgtggatgtaacagtactgcataatctagttcctgcaagataagcattctatttaagtcatatgcacccttctctactatatcaaattctatatctggattatttgcaactaactgtgcaactacatctgaaaatgctattccaagtataagtggaggtattcctattctaacttttcctttaaattgaactgaatcttctcttaaatcttccatcatatttttgtattcatttataatatgttctgcatttacataaaatctttctcctgctggtgttaacccatttaacctacctttatacctttcaaataaatatacatcttcactttcttcaaaattttttataatttgacttaatgctggttgagatatgtgaagtgtcttagatgctattgataaattaaaaccagatttcactatttcaacaaaatatttcaactgttttatatccattttaaacccccttccccaaaagtataatttagattatattttttcttctaatgatattttataggaaaatcaacataatttcattaatattttaacaaaatatttttctaaatctactataaatttttatcctataaatttttcttatacactatataaaaaattagacttagacaaaatgcttttttcgccgtaatctataattagaaacaggaaaacctaaagcattaggaataaaagtaattgaaatacttaaaaacaagcttgtattaaaaaagtactttattatagtgttccctaatttctttattcagaaaatttttaattatcattcaagaaaggtaactattagatatgaaagatgtagtaatcgtatcagcagtcagaacacctataggaagttttggaggtgtatttaaaaatacttcagctgttcaacttggaactatcgctgttaaagaagcgatatcacgtgtaggacttaatttatctgaaatagatgaagtaataattggaaatgttcttcaaacagggcttggacagaatgttgctaggcaaattgctataaattcaggtataccaaattctgttccaagctacacagtaaataaattatgtggttcagggcttaaaagtgttcagctagctgcccaatcaatcacatctggtgaaaatgatgtggtaattgcaggtggtactgaaaatatgagccaagctccttatatcgttccaactgctcgctttggtagtaaaatgggtgacataaccatggtagatagtatgctaacagatggccttattgatgctttcaatcagtatcatatgggaataactgcagaaaatattgcaactaaatttgaatttactagagaaatgcaagataaattggcattagaaagtcaaaataaggctgagaatgctataaaaaacaaccgctttaaagaagaaatcgttccagtagatgttttaatacgtcgaggaaaaatagaaactattgataaagatgaatatcctaaattaggcatgacatttgaaggtttagctaaacttaaacctgcattcaaaaaagatggtactgtaacagctggaaatgcctcaggtattaatgatggtgcggctatgttaatactaatgagccaacaaaaagcagacgaactaggtattagaccacttgctaaaataaaatcctatgcttcagctggtgttgaacctgaagtcatgggtactggtccaatccctgcaactagaaaagcactgaaaaaagctggacttagcatcaatgatatagacttaatagaagcaaacgaagcgtttgctgcccaagcattagctgttaaaaatgaacttcaaatagattcatcaaagttaaatgttaatggtggtgcaatagcattaggacatccaataggagcaagtggagctagaatacttgttaccttaatttatgaaatgcaaaaacgtaaagttgaaactggacttgcaacactttgtattggtggtggtcaaggaatatcaatggtggtttcacgataggaggaaatatgaataaaatagttagcattgatgaagctctatctcatgtaaaagatggagatacaataatggttggtggattcatggccaatggttcaccagaaaatttaattgattatttatgtagtaaaaatataaaagatttgacactaatttgcaatgatactggctttattgacaaaggagttggcaaaatggttgtaaataagcaatttaaaaagataattgcttctcatgtaggattaaataaagaaactggaagacaaatgaacaacaatgaaacagatgttgagttagttcctcagggaactcttgctgaacaaatacgtgcagctggttatggtctaggaggtatactcacaccgactggtattggtactcttgttgaggagggaaagcaaaaaattgttgtcgatagcaaagaataccttcttgaaaaaccaatttatgcagatgttgctcttctatttgcatcaaaggtcgataaagcaggtaatctagtttataaaggctctatgaacaattttaataatttaatggcatctgctgccaaaattacaatagttgaagcagatgaaatcgttgaaattggtgacattgacccaaatgaagttaatacaccaggtatttttgtgaattacatcgttgaaggaggtaatttataatggataaattagaaatgcaagaatatattgcaaatagagtatctaaagaattaaaagacggagccgttgtaaaccttggaataggtctaccaaccaaagtagcaaattatattccggataatgtaaacgttatcttacaatctgaaaatggctttttaggtttaggttcagccgaagatggaaattcaagtgatgaaactattgtaaatgcaggtggtcaaccagttactatacttcctggaggatgtttctttgatagtgctacttcttttggaataatcagaggaggtcatgttgatataactattcttggcgcacttcaggttgacaaatatggcaatatagcaaactatatgattccaggtaagatggttccaggtatgggtggagctatggacctagtaactggagctaaaaaagttattgtagcaatggaacatacttcaaaaggttctgcaaaaatattaaataattgtactcttccacttactgcaacaaatgctgtagatttgatagttactgaaatgggagttatggaagtaacatcagatggaattttacttaaagaaataaatccagctttcacattagatgatgttatttctgctactgaagctcctttaatattgtcagattcattaaatggaaaaatatctgttgtttaaaataattaaaactagaaaataaaaatctcttagacgtattacatataaatttgtattgcttaaaatattaatataaaaataaaataaaattggaggaaatgaaaatggttaaagataaagttgtattcgtaacaggagctgcaagtggaataggtaaacaaatagctgaatcgttcttaaaaaatggtgctaaagtaatgttctctgatataaatcaagaagctttaaataataccataacagagttacaaaaaaaaggttatgattgcatgagtgtaaagtgtgatgtaactaaggaagaagaaattaaccacgctatagataaaactgttgaaaagtatggcagattagatatattaataaacaatgctggacttcaacatgtttctatgatagaagatttcccaactgataaatttgaatttatgataaaaataatgctgacagcaccttttatagctactaaaaaagcatttcctataatgaaaaaacaaggctttggtcgtataataaatatggcctcaatcaatggtgtaataggatttgctggaaaggctgcttataactcagcaaaacatggacttattggactaacaaaagttgctgctcttgaagctgccgattctggtataacagttaatgctttatgccctggatatgtagatactccacttgtcagaggtcagtttaatgacctttcaaaaactcgtaatataccattagaaaatgtcttagaggaagttttgtacccacttgtaccacaaaaacgcctattagatgttcaagaaattgccgactatgctatgttcctagcaagtgataatgctaagggtattacaggacaagcttgcttactagatggaggatatactgcacaatagttattatatttagggcttgaagaaagtattcttcaggtccttctactaaggagggatatttatgagtattatcgcaccaattggtataattattggtatcatagctattatatatttttcagttaaagaaattcatataactatagctgctccaatagcaactttaatagttgttctcttaaataaaatggatgttgtaacatcaatgctaggtgctgacaaaaacaattatatgggtgcacttggaaactatataatgagttattttgcaatattcttattaggctcaatacttgctaaatttatggaagaaagtggagccactgtatcaatagctgattttattttaaataaagttggctctaatcatccttatagagttttagttgctatatttatagtaagttttatattaacgtatggtggtataagcttatttgtagttatgtttgcagtcattccacttgcaagaactctatttaaaaaacttgatatttcttggaaccttattcagataccactttggcttggtattgcaacaattactatgactataattcctggaacaccagccattcaaaatgttatacctattcaatatctaaatacgtctcttactgcagctactataccaagtattgtaggtagtataggttgtgctacgtttggacttgtctatatgaaatatgctctaaacaaaagtattagaaaaggtgaaacttacgcaacttacacttcaaaattagaagaagaatctttagatagagaattaccaggattttttgcaagtatttttcctctattagcactcgtaattatagctataactggaagtacttttggttcagaatttatgaaaaaaaatgtaatttacatagctttaatagttgcaattcttttatctgcttttttattccataaatttctatcatctaagatacagacattgagcataggtgctagtggttctataggtcctatatttgctacatcttctgcagttgcatttggagcagtaataatggctgcacctggttttgatgtatttagcaaacttataatgtcaataccaggtagtccacttataagtcttactgttttgacttcaacaatgtcagcaataacagggtcctcttctggtgcattaggaatagtaatgccaaactttgcagattattatttaagtactggtctaaatccagaattaattcaccgtgttgctacaatagcctcaaatatactaactatagttccacaaagtggtgtttttcttacattcttaagcttatctaagttaacacataaaactggatttaaagaaactttcattgtagttgcagttggttcactaatagcagaaattattgtaattacattaggattactaatgtattaatataaaacaaattaaaattcataatatgaaaggtggtgtctcaaagtgaactttttacttaatgagacactctttttgtatgaaatcaaatatattttaatcatttcaacaataaaaaagaacctttctctattttgagacaaaccctttttattccttaaagatttaaacaattataatttgttactaatacgaaaacatctattgaataaatttaaccaaataaaaaaaaatttatcataactataaatttacgttatggaattattataaaaatattattttctctaagtaagtaattccatactatacaggcttttaatacaaattttcaaacacactgaaatatacctatttattccatatatatcttttttacatatctttacagtaaaaaaagtcttaatcttatgttagtatagattcacgggtaccccctacactaaaggttacaaatcagtaacatttttagaatttttagattaagaggtgtttaatgatgagaagaaatataccaacaaaattaaaaactatattagctttaggagtgttaactttagcaacagcttcaagtgctgttactgcaagtgcttcatcacttgaaaataatgtaaatataagtaacaaaagtttagtatatagtaatactaaatacaagttttctgcaaaaccaaattgttctgtaaaaccagaacttaaacctgataaagataactcttgtaaggataagaatcataatgacaagaattgcaacaacactaataaacctgaggacaacaataattcagactctactaataagcctgataacaataaaccagagtctaataaacctgaggacaacaataattcaggctctactaataaacctgataacaataaaccagagtctaataaacctgaagacaacaataactcaggctctactgataaacctaataacaataaaccagagtctaataaacctgaagacaacaataattcagactctactaacaaacctgatgataataacaactcaggctctacaagtgaaaatttttcagcttaccaaaaagaagttgtcgacttagtaaatatagaaagagctaaagctggattaaatcctcttactcttgattcttctatatcaaatgttgctacaaaaaaatctcaagatatgattgataacaactatttttcacacaattctccaacttatggttctccatttgacatgttgaaaaaatttggaataagctataagacagcaggtgaaaatatagctatgggtcaaaaaactcctaaagaagttgtaaacgcatggatgaattctgaaggtcacagaaaaaatataatgaatccaaatttcagtaaaataggtgttggagtagcacaaaaaagtggtggttcaatttattggacacaaatctttgtaggataaaatactctttttccatgcatatcaaaagagtatctctaagtgataaaaaacacaaatgagatactcttttgtatctattttaaaattatcaaatccaaatatacatactataaatattatttgttctcttaattttagtgtgtagaacaatatataaaaagtattggcaagatgaaaatggaaaacttaaaaagatatttaataggtaaaaacaggatcttaatatcttcataaaaaaaggctgtctcaaaatagagataaggcctttttcattgttgaaatgattaaaatatatttgatttcatacaaaaagagtgcctcatgaactaaaaagctcactttgagacactctcttttatcaattctatataagcattataatactttaatattattcagctaattttttgtatccttcatatctttctttagcatcagcttcagctttagcaaataatccatcagcttcctctgggaattgtttagctatagcagaatatcttacttgtgcaagtatgaaatctttgaagcttgcagttggttcttttgaatctaaagtgaatgggtttttaccttcagcttttacttctggattgaatctgtataaatgccagtatccgcaagcaacagcttgtgcttcattagccacagttcttcccataccttcttttaatccatggtttatacatggagcataagctattattagagatggcccatcatgtttttcagcttctaaaacggctttgataaattgatttttatcagcccccatagcaacttgagctacatatacgtttccatatgtcatagccatcattcctaaatctttctttctagattttttacctgaagcagcaaacttagccatagcagcagctggagtagctttagaagcttgacctcctgtatttgaatatacttctgtatcaaatacaagtacgtttacatcttcaccagatgcaagaacatggtctaatccaccgtaaccaatatcatatgcccaaccgtctccacctagtatccattgagatctcttaactagataatcttttctatcttttatagcttttactaattctttagctttttcatctgtacaatcacaagctggtttttctaataattcaacaaccttagcacttgctactttagaagcttctccatcatttctagaatctaaccactctgtaaatactgctttagcatcttcacagatatccatagaaactaactctgtcatagcatctactattttatttcttatttgcttaacagctgtgtacataccaaatccatattcagcattatcctcgaataaagaatttgcccaagatggacctttaccttcatggttacaagtataaggaattgatggtgcagaagctccccatatagaagaacatccagtagcattagctatcatcattctatctccatataattgtgtaactactttaatgtacgcagtttctccacatccagcacatgctcctgaaaactccattaatggttgtctaaattgacttcctttaacagtatttgcaggcataacatcaacttttggagctacttcatcaggatttactgcaaatgcccaattatctaactctgtatcaagttgagtatctattggcttcataactaaagctttttctttagctggacatatgtcagcacagtttccacatcctgtacagtcaagtggactaacttgaattctatattttaatccttctaatcctttacctaatgcttttttagcttcaaatccttctggagcattagctaattcttcttcagtaactaatactggtcttatacatgcatgaggacatataaaagaacattggttacattgaatacagttatctattatccattcaggaacatcaacagctataccacgtttttcataagctgcagtaccacaagggaatgttccatcttctataccattgaatgtacttactggtaagttgtttccttcttgtgcagtcattggtcttagtatattttttataaattctggttctttaacttctcctttatctgcatcaacagcattttcccaagaagctggaacttcaactttaactaaagcatttattcctgcatcaacagcagcatagttcatattaactattttttcaccttttttaccataagctttaactatagaatcttttaagtatttaacagcatcttcttctggtattatttcagctaatttaaagaatgcagattgcattatcatgtttattctgtttccaagacctatttcttgtcctagtttaacagcattaactgtatagaattttatatcatttttagctatatattgtttcatatgagctggtaaatgttcttcaagtcctgcttggtcccatatagtgttaagtacaaatgtaccaccttttttaagaccttttaataaatcatattgataaacatatgattgtttatgacaggcaatataatcagcttcatctattaaataagtagctcttattggagtatcaccaaatcttaagtgagacatagttataccaccagattttttagagtcataatcaaagtaagcttgagcatatttttcagtatggtcaccgattattttgatagcttgtttattagctccaacagtaccgtcagaacctaatccccagaacttacatcttatagttcctttagaagctatttttattggctcagatggagttaaagaagtattagttacatcatcaactatacctactgtaaatccatttttaggttgttctgaaactaagttatcaaaaacagtttttatatctgaaggagtagtatcttttgaacctaatccgtatcttccacctattatcataggagcattttcttttccatagaatacatcacgtacatctaagtataatggttcaccagttgaacctggctctttagttctatcaagtacacatattctttcaacagtagatggcatagcatctaagaaatgtttcattgagaatggtctatataaatgaactttaactaaaccatatttttctcccttagcatttaagtaatctatagtttcttctattgtttctgttactgaacccatagctattaatacgtatttagcatcttctgctccatagtaatcaaataaactatgttttctacctgttaaattactcattttttccatgtatttttcaactatacctactatattttgatagtatttattagaagcttctctagtttggaaatatatatctgggttttgagcagtaccacgagcaactggatgatttggagataaagcattatctctaaatgcttgaactgcttcaaagtttaataaacttgcataatcttcattttctagtaattcaactttttggatttcatgtgaagttctgaatccatcaaagaaatgtataaatggtaatctaccttctattgcagctaaatgtgcaacaggtgctatatcagctacttcttgaactgaaccagaagctaataatacacatccagtttgtctagcagccataacgtcttggtgatccccaaatattgataacgcttgagatgccaaagcacgagcacttacatggaatactcctggtaataactctcctgcaactttatacatgttaggtatcattaataataaaccttgagatgctgtaaaagtagaagttaaagctcctccttgtaaagaaccgtggaatgttcctgatgcacctgcttctgactgcatttcaacaacattaactgtttgtccaaatatattttttcttccttgtgatgcccactcatcaactacttcagccatagttgaagatggtgtgattggatatatagctgctacatctgtaaacgcataggcaacatgagctgcagctgtatttccatcaagtgttttcataaacttagccataatatgtatcctccttgatagctacaattgtacttgtttataacaagtctatttttttatatttacatataatttacacaacaaaaatataaacacacatatagtcgcgcaaatactctatcttctaatataatactacagattagataaaattcctttgaaaattgtaaattaattacatatttaagtagattttttttaaaattaaatatgttaagtttttttcataattttgtatacaatatataataaattaagttagacttttcaaacttttttatctatttgtttacattagtataaaaagtaaaataattatctttattatatgtaaatttttatatatataattttaccatattacatcatatttttgtaagtttttattacattttttataatacccctttattttataaattaatctaatcgattaaatttatcctatagaaatttattacatttaaaaatatgctagcaaataaaatatctactagcataaagtctatttataatattaatcaactattaattctactaaatctccatttttaacgcctgctgcatttccctcttccatatcaacatgcatttctagattaaagctatcactagctcttactaatacattttcaaatactaatgctcttggtccagatgttttaacttttactatttgcttatcagttacaccaaatttagcagcatcttcattgctcatatgtatatgtctagaagcaactataactccttctttcatttcaacttctccagcaggtcctactaatttaacacctggagttccagctatatcaccagattcttttattggtgcttttactcctaatgggaaaccatctgctaaagatatttcaacttgagtatgagctctagctggtcctagtactctaactccctttaaagttccttttggtcctactaaatccactttttcttcacaggcatattgccctggttgagataatggtttaaatttagttaactcatgacccgccccaaataatacgtctatatcagcttgactcaaatgaacatgtttattagataatgctattggtaatttcattgaaattccctccttttaattatttaaattattgcaatacaattatacataatattacctacaaaatcaaattatattgaatcaatatatatctttaaatttttatatattatatctttaaattcttgattatctatataagatacatcatctgtattgtttaaatatatattgtgtaaaagtttagtatttatactcttaaagaaaaaatccataacaatctgtccacctttaaactgtgaatcatatgatttactcccccccactgcaatatacattcctatccgtttcttatttctatcaattgaaggtttatttaatacatatttacttgcatatatagcttgagttctatcaacaacagtctttaatttagctgatattgaatcaaaatgtacaggacttattactatagttccttttgaatcatcaaacattttatataatggcttcatatcatcattaaacttgcaataccctgttttttcacaaaatccacatgctgtgcaatattcaatatccatattgtagatattaaatattttacaacttaacccacactcttctagcatagcttttactttatttgctataaaactgcaatttttattaattcttggacttccatttattattataatctctgtacttttaagtccttttttatcgtttgaatccataatcaatctacctatcctttaacataactattaaaatatcatcatcataattatcttttgatgagaaattctttaaatccaattttagattttctactattaactgttgatttaatctaaaattttcttttagaaagttttctaatctgtttataccatactcttcttttgatgaattttttatctctaaaattccatcagtgtacatacataccattgcataatcttccattgaaagagtattattttcataagtagcatctttcattattccaataggtatgccctttttacaatttaaattattttctattgtgccatctttctttacaactacaggactatagtgacctgcattagacacagtaatcatattttctttagtatctataatacctatcaaacaagttgtaaatactcccatcttgtcaaattcatcatataacatcctatttaaatttgtcattatttctcttggtgtattgtattgattgcataatactttaaaagcaccttttatcattgcaacaacataatttgataccattccatgtcccattacatcagcaacaatataaactatatgttcgtcatccacttttgtagcataataaaaatctccacctactacccttgctggtttatggtaaaaataaagttctttctcatcattacaatccattttacctttatccataataagctgttgttgtttatttaatatgttcaactcattttcaagaactttgtgttttacttccttttcattatgttcatataattgcatcccaacagaaacttgtttggacaatatactaagaatatttaaatcatcactagtatagtttttactatttgcacaaactatacatcctatagtctcatttttatcctgaagtttgtaatatatataactttccaaatttatgcccttttttgagcatggttttaaattatttaggtatccccctaatgactctttctttaaaaacatatcaatcataggatataaatttgttttctttttttgctcaacattataacaactaactatagtatccttattatgatgactatttataattattaaagcttctttactattagtaatattacacgcttgtttacttaaattttccaaaaagccatcaatactcttattaaggtatagttttttagtagcttcatttatggcacttattgagcctcttagtttatcaattaaaatttgtacattattatttttattagttatttctattgataaacttaagagtgatgcaacagatgatataaaatctatatcttgttctgttatataatcatcctcttttaaaaaacaagtcataaatccaacaactacattatttattataaaaggaaaaactattctcccaatataaccttcagcttttgctaaatctcgttcaccttctgctctagaatcttcaaatacattttccacatatattatctttttttcatttacagcctcatgtatatactctggatatgtgtcaaaatcaatttttgcacctttaagactatttattggaaaaatttgaggtacatattctaaggtttgcgaacatactaagtaggcatatttagaatcatttttataaaatagatttacacatgcctttgtagggtgaacaacttctaacattttttctattatgtcatcttttatattaaaaaaatctgtagattccgtcaccatagcggatatctccactaaattcttcattttataactgccattagtcatactcaatttctccccctatatattaaactatttattagtattttaacatacattctttatagtaaaaacaaaaacaacgacaaaactagcaactaatatccagttaaatcctgtcaataatcctataagaagtaatgtaatcaatgcatttagacctgttctccctttttcatccataaaagttattttagagatgtcgatattatttttcacattatttatatgctcttttacttgttcttccatatttcttttatatagtatataaactacaccaattaaaaacactcctatacctagaatcatgtttaaattaaaagctatcataagcagtattgaaccaaaagccaactttaaaagcttaaaaaatacgctatctatctttagagttatatttctgatttctttacattcatctcttaaagaatatccacttgagtctaggttattaatctttgtttttacaatttcagaataaaaaagctttattatcccatttaacattttcatcactcctaaatattttacatatatttgtaagttttacaattataatattttttatacttggtaataataaaaaataacaaatattttatgatttagtatttactgtaaataaattattgaagctttattagttaagtatagatttttaataaatatttttataattagaaggaagtggttttgtgcaaatagaacaactcgatttagaaacgagaaataaaatatactgctatactaaaaaaattcttagaaaatatcaaaaaggcataacatctggaaaattaacagcagataaatttgcagataatatattgtctcaacattttatcagtagtatacttaatgaaaaaatagtcaatgagacaaattttaagatatcttatagaaactatatagaaactttaataaatattcaaaatgaaaatttatctaacttaagaaaaaaatctactaaaactgcaaaatgtttcaatatctctcaaataacccaattaaaaaacttactaagtaatactggttataatttattaattccatataaatacttaactgctagagatatagaaggaatcgttactcttattaatactgggtctattgaacttggaaatgagagaatctataattatatatcaaaagcataataatttaaacctattataaaaaggcaatttatttaataaaaaatatttttaatattaaataaattgcctttttaattttggactaaatactgctatccaagtgctttttctagtttagataaatgttgtattggataatattttagtagctctttaaattgttctactgataaaccttctgttgttgtatatattcttattttttcatctaagtcactattaataaatttgttttttaaatcctcaaaatttacactactcattttacatcactccttatgtaacatattcatttgtattattttatccaaatacataaaatttattacataaaaatatatctatttaataatttaataaaaaaaagctatctcaatttagaaattactttctatatttgagatagctctagctaaactaatagccaatagttataaataattatttataactatctgttgctttttccagccatttgttgttcagccatttcaactaattttttagtcatgtatccacctacataaccattttctcttgcagtaaggtttcctttatcaacttgttgataattactcataccaagttcattagctatttctaatttcatttggtttaaagcctcttttgctcctggtactactgttctgttgttgttattgttacttgccatgttgattaccttccttctgtttaatttattttgtgttgctgataatattatgtgattttaaacatttttaattcaggtaatttttagcaattaaaacctgccaaatatccagtagaaaaagctatttgcaaattgaatccacctgtatatgcatctatatctattacttctccagcaaaaaataaaccttctactaattttgattccattgtgcttgaatttatttcgtttacttttacaccaccagaagttattatagcttcttcaataggtctgtatctctttactgtaaactttaaattttttaataaatggactaagttttttctctgctctctagaaatttggtgaacaaccgtatttgcattaatttcacttaagtttattattataggtattagtttttttggaagtaaatcatctaatgctttttcaaattttttatttgtatacttctgaaaatctttttgaactcttttatccagtttttcctcatctaatgcaggttttaaatctaataatatagtgtaattttctttccttgtatctttcattctacaacttgcagacttgattataggtccatctaaaccaaatctagtaaattcaagttctccaaaatcactataaactttcttttgtttgctattaaacacccttatttcaacatttctcaatgataatttttctaaatcttttgtaaaactttcttgtacttctataccaattaaagatggttttgtatctataattgtgtgcccctgtgaaattgcaaatttatatccatcaccagtagaaccagtaagtggataacttaatccaccagttgctactacaactgaatcacacttaatttcttttttatcgtttaaaattactttctcaattttattatttttagatattattttttctacttttgaatttaataatatatttactttcttacttttaagttgtctttcaagagcatttacaatatcaaaggctttatcactctctggaaaaaccctttttcctctttctgttttagtctttactccaagattattaaacatacttattacatcatcatttgtaaaagtataaaaagcactataaagaaattttccatttgtaggtacattttctattaattcctctatttcacaagcgttagtaatattacatctaccttttcctgttattgcaagtttttttcctaatttatgatttttctcaattaatgttacatcatagcctttctcacatgcagttgatgcggctatcatccctgctggtccaccacctattattactaccttcttcaaataatcactcttttctacccttaatttttttaatttaaactattgactctataccttaaaatcaatttaattttaaaagtttaaataatgctggagctcctgctattccataaaaaacaactactgtattcttaataaaattcataaaaattatactcatagtagagtcacttatatttaaagtgactattaacattgaaataaacaacttaatgccaatatataacattcctattgttactatcccaaccaaaaacctacatattcttgaaaaaattatatttttactccccttatttttattgctaaaatttatttttttgttattattatctgtattaaatttaacaaatctatcctcaaccatatatccaaatacaaatcctactattataccaaatttttcaaaatattcagggctatttagaaatatagctactattataaatggtataagtaaaactacaagtaaaatataatttttattatcatcaatatagtcaaatatttttataaatataactgtaaaaaatattcctaacatccaacccactatcacatctattggccaatgaacagctaaatacagcctagacaatcctactcctaaaaccataactgcacctattaaatgaagatatctctttttaaatatagtcataatactaacccaaaatgttgttgcagtttgagtatgagcacttggaaaagaataaccaccagcagtagaaactctcaatgattcaagaccttttattcctattggtctgggagcttttacaaactctttgatgcctaaatttacaacaaaatttccaattatagcaaacagtattttctgtccacattttttatttatacaccagtatataattgttgtaattaatattaataacggtgcttctgtgcttattgtaaagacaagaaatataaagttcaaaattggatttcttaaattttggaaaaataataatatatttaactgaatatccatatagatgtctcctttactaaaattttatataattaactaaaaagcactaactcccttagaaattagtgcttttgattcacatttaaatctattctacatcctcaactatacctatataaggtaaatttctatacttttcagcatagtctattccataaccaacaataaatttgtcttctataacaaatccaacatagtctacaggtatattagcttttcttctctgaggtttgtcaagtagagtacatagttttaaagattttggatttctagtttttaaagctgcaactagattacttaatgttaaaccagaatctattatatcctctacaatcaacacattctttccttcaatatctacatctaaatcttttaatattttaactgttccagaagactctgttgagtttccataacttgtaacactcataaaatctatatttacatccaaatctatacatcttattaaatctgaaacaaatacactagctcctttaagtatacctaccactagtaaatcttcgcctttaaagtcttcttctatcttttttcctaattcataaactttttcttttatttgttcttctgtcaacatttttcctgtaactttgtacattttgtatcctcccgctttccttctattaacttatatattatagcataccaaaatatcaattaaaatctttttcatcatttttagacctaaattaacagcttatccatacttttttgctttttccattaaaaatttggaataacgattcctttgtattataatctatatgtacatatattaatcagttatttttatcgattatataattttatttttggaggtacttttatgagcacaaatcatggagctaatttatatagtttatctagtaagtatggcttttcaaaggaagaatttatggattttagctcaaatataaatccttttggtacatcaagtttagccaaacaatacattgtaaacaatatagatatggtatctatgtatcctgaccctgattacatagacttaaaaacttctatatccaattactgcaaatgttctatagataatatagtacttggcagtggagctacagaactaatttcatcatttatacatacaattaatcctaaacaggctcttttactctctccagcctattcagagtatgaaaaagagttatctaaaattaattgttctatagaaaaatactttgcaaaagaagaagataattttcatataaatttagaaaatcttataaaaactatcaatgctaaagattatgatttggtagtaatctgtaatcctagtaatccaactggatttgcatttactaaagtagaagtgagagaaattttaaaaaatacagactcatttttaatgattgatgagacttatgtagagtttactgatacagatacatactcttgtactcaattagttgatgattattctaatttattcgttataagaggtacatcaaaatttttttcaacgcctggaataaggcttggatatggtcttatatctaacactaatgtcaaaaatgaaataaataaaaatctagatttatggaatataaacataatagcttctaaaatgggggaaatcatgtttagtgatttagattttatatcaaatactatttccttaatgaacactgaaagagattacctgcttaaagagcttaagaatataaaaagcttagatatatacaatactaaaggtaatttcatattgtgtaaaatcaaaacaaaggaattaactgctaaatcgcttcgagaacaactgcttccacaaaaaataataataagagattgttgttcatttgaaggtctagatgagtatttctttagagtatgtatattaaaacctaatgaaaataaattattaatatcatctcttaaagcaatttttaaataaaaaaatccctttattttataatttttttataccataaaaaatgagctatctctatttgagataactcatttttgattattaaaaaactaagcactttgctcttctttgtttccttttttactcattccatcatttattttatctactactactgctattgcattatctcctgatacattacatgctgtaccaaaactgtcttgagttaagtataaagctatcattaaacttgcaagcccaccatctgatggtattccaaccattggtaggaaaggaagtgcactcattatagccccacctggtgctcctggtgctgcaaccattgctatacctaacattgcaatataagggaataatacacctattccatgtggcataccattcatcattaaaactgcagttgtaaatcctgttattgatatcatactacctgataaatgtattgttgcacaaagaggtacaacaaattctcttatttgcttacttactccatttttttctgcacaaccaacattaactggtatagttgctgctgaagattgagttcctatagctgttaaatatccaggtacttgattttttaacattcttactggattttttcctgaaaatacacctgctgctgtgaattgacatgccatatatacaaaatgtaaaggtattactactaagtatactttccagaatacccctaatattgtccatacttcccctgctatagttatatttgcaaaagttcctgctatgtataaaggtaataaaggtataatcactgttgacaacgttttcgttacgattccttgaaattcttggaagaaattaaataaagtctctccttttccatgatttcttaaagctgatattccaagtcccattacaaatgcaaatacgattgcagctgttacatctaccataggctctaatggaattgtgaatattggagctaacattcctgcctctgggtctccaatttgacttgcaacacttgcatcaataaaatttgggaagattaatgtagatactgcaaatgataataatcctgctattaaggtagaaccatatgctattcccgtagttatccccaataactttcctgcacctgttgctaaatcagctatacctgctgttacaaaacctataattataaatggtataacaaattttaggaatgctgagaataaggtactaactgttactaatatttgtactattatttctggtgcataacttccgattaaaataccgactatgataccgatgattagtttgggcactaaacctatttttttcttcataatatttaccctccataacttttttaaattaagcattcttgcacattgaatacttagttaaatattggatatccacttattatgataatagagttttacctctccgtcaacaatttaaccattttttgttaataaaaaaaagaataacatatataaattgttattcttcttcatcttttatagaaaattctacattttcaattatatttgaatgtttatctttttttataataactctatacttattaatttcttcattcactatacctatactccaaattaaaactatagcatcatctataaaaccaaatgcccctgcaatcatctctggaattatatcaaccccagatacaaagtaggatatagtaaaaattaatacagaaattacctttattttatcaactatattgattcttttatctgtcataaaatcaggtagtttaagtaaatcaaatacaaaaaccaaaccaaatttagcatttttaaatctgaccaaaattttttttaaaatatctaaaactatattaatgattatttttaaaaactccatatttatcacctcttataattataggttattctacattataaccgatataattaatttgatgaacatattagatataaattttatcaattagtttatatttaaattataataattcaattcctgcactactacaattttgaatcatatcctgtggccatactccaacttgtacttctcctatatgagctttttgtaagaaatacatacatattcttgactgaccaattcctccaccaattgtatacggaagttcgccatttaaaagcatcttatgatagtcaaactcttttctctcttcacatccagcaagtttcaattgtctatcaagagattcttcatcaactctaattcccattgaagataattctaatgctgaatctaaaacaggattgtaaaataatatatccccattcaattcccaatcatcataatcagggcttcttccatcatgtttttctcctgatattaatgtttttcctatttgagttataaatactgctttcttctcttttacaattttatcttctctttccttcggtgataattctggatacatatcttctaactcttgtgatgttataaaagttatttcttctggtaatatttcttttataccttcatacatactacatacaaaaatttcagtatctttaaatactccatacaatctttttacaacatcttttagagtcttttcatttctactacttttatctataaccaattcccaatcccattggtctacataaagagaatgtatattgtctaattcttcattttttcttattgcattcatatctgtatataaaccactaccaacttcaaacccatattttttaagggctaatcttttccattttgcaagtgattgaacaatttctgcatttttattcataaatggtatatcaaagcttacagccttttctccatttaaattatcatttgcacctgtttctggcaatacaaataacggagaagaaactcttataagatttaattcattacttagtctcatttcaaaaaaatcttttaatttttttatagctatttgtgtatcaattacgttcaaactacttttataatcctttggtattattgtgctcatatcattcactccctatatttatatatttttccattaaaaaaacccttcatccctatataaaagggacgaaaggttgcttttccgcggtaccaccctgattagtttgaaataaattcaaacccagctcacaatgtacagatattactcgatacaccccaatatgataacggtttggttccgactaagcctactcttttaaaatttcggttagcaactccaggatgttcttcattatagacttcatattggtctcacaccatcaccaactcgctttaattacattctataactactcttcctttcaaagtctttaagagtttaattcaataaaatttagctctcttatgttttctatttattcataatagtatgataagtgattagttaaaatttgtcaagtttattatttttttatttttaaacactttataaatttttacctatactttataaattttcaaatatagtctttaatctgtccatacattcttttaataaagactgtggacaagctacatttattctttcaaatcctattccttcttttccaaatatataaccttcatcaaataatacattagcttttttaaacattaaatcctcaagttctacttcatttaatccataagcagtaaaatctaaccatgctagatatgttccttctggataaacaagttttacttttggtaggttttcttttaagtattcatcaataaattgtatattattatctaagtaatcatttaattcattaagccagtcttcactttcattatatgctgctattgtagctacaatagcaaagggatttggtgaagttgcaactccaacagctgtaacctcttcttgatatttcttttttagttcatcattattcactattatattagacaactgcattcctgccagattaaatgttttacttggagctatacatgtaattattttatccttgtactctgggcataatgactgtaaaggagtatgtttaaatccttttctaactaaatcagaatgtatctcatcagctattatccataggtcatattttttacatatttctacaaccttctttaattcatcttctctccaaactcttccaacagggttgtgaggactacaaagtatcagtactttattgttgctacacttagctttttcttctaaatcatcataatccatcctataagtaccattctcatatattagaggattgtttacaatgtccctattattgctctttatcttagcttcaaatgggtaatacactggtttttggactattacaccttcattagaattagttaatattcttactaaaatagcaacagcaggtacaacaccaggactaaaaataatatcttttctatttatttcccagttaaatctccttttataccaatcacaaactgcattaaagtatttatcactatcatttgaactatatccaaatattttatgttcaacttttttacgtaatgcttctattattggttctgcacattcaaaatccatatcagcaatccaaaaaggcaaaccatctttttgtgcttttgttgaacaattagttctaaaatcccattttacacaatctgttcctactctatctattactctgtcaaaattatacttactcattttttccctcctaagaataaaatttttataattgttaagtccattactagatgcactttggtattattttacaattcttaatattataataatatcacttttttgtccaatagatttaaaatataattacttttccatcatattttttcaatattccaaaatcagtttcattatatcaaaataagattgctcatattaattattttctaattaacataagcaatctttttctataacttctataattataattttaaatgtagaattattagtttggatattatcccaatctcttttcaaccaatctacaccatatatctacaccatattctaaagctttcgtatcaaatgttacatttggattatgaaatcctggtgtagcatcagctcctaatccaatatatgtagttttacattttagtttttgtgtataataatggaaatcttctccaccagaatttttaaatatacctatagatgcatcagctcccaatacatcttttatagtttcttcagccaagtttacaagttcttcatcaaattctgctgctggtactccatctttggaaattagtacagcttctgcatttatagaacttacagcagtttttacagcatgtattgctttttcttttaattcttctattatatcattactttctgcccttatatctaaagccataaatgcttcatctggtatattattataagtttctcccttaactgatatatttgttacttttatagaatttggtatagctggatttactcttattgcatttattgcattcactgctaaacagacagcatctactgcatttactcctaaatgtggtttagaaccatgacaagtgatacctttaatcgtaaattgcattatacagctagcacaatggtacattgcaggtatcgcctttcccaacctacaatcttgtccaggtcttaaatgcatccctaccatttcttctacatcatccaacaaaccagaatcaattactcttaatgctccatataatttttcttcacctggttgaaaaagtatttttaacttacctctttttactaaatttctctcttttattaactttgcagctgttaaaagcatagaagtatgaccatcatgaccacaagcatgtatcattttcttttctccatctatgataaattccaatgcatccatatctgctcttatagcaaatactggtccttcttttttagaatctatagttactataataccagttcctgcaactcctttattaatattttcaaaccccattttttcaagctcttttaaaacaaactctgatgtcttatattcttcaaatcctttttctggtatagtgtgtagataatcatacactttatgtacatactcaatataatctttgttagttcccataatctagctcctccttaaaatttaaactttccatttatattaaatttttattataattacctatactacgaaataattcattataagcattgcaatacaaccatttaaagttgctataacaaacatatgtggataatatttagtttttaactcagctgttcccaaaagtctccccataaattgtatctgcgctcctgaaagcaataacattggcaatagaattgcaacatgtgcttgacttatttgacctgctgtaaataaacctgcgattactccagatgctcctcccattgatataaatattgtcattatagctgttgctgcaacacctggaagtccaaagatactcattacaggtgtaaatattgtccctattacatccaaaagacctgttaaattgaacacagaaattatagcaaaaccgaagatgacatttggagccattgaatttgtacttatttggaatccatttctagctcctccaataaacgcatctatcacatttccttttttaacttttacttctttttttgctacctcactcatgttaagcttcccccttgtcaaatttatttaaatataatctaagtaagttcgccccaacaaacttcataattaatattaaagcaagtggtataaatattggtacatctcctataaatggaaatagtgctgctccagaagcaaagaaattcgtaattgcagacgcacctgaaaattgaaatgcacaaaatacagctttttgtttttcatctatatacccatcatctttaagttctttagtcatagatgcagctgcatctgtagactgtaaactagctatcaaagttagtcctgcaaatccaggtaaccctaataatggctttaatagtggactaagaagcttttgagctgccttcattccatctaagtggtctataactctaactactccaagtgcaaacataactgatggtattaatgtcaatgcatatagccatccatctcgagggccagtacctccatcacctctaaagtttgaagctaatgtacctacaccatcattaattgttcccaatgttccaaaagaacctaatacattgttaaaatccaatacttttaatggtcctggtgcatctttaaatattcctgaaaaaaataatgctcccaatattaatgctacatacccataccattttacctcaactttttctgttgttgattctaatttactcatataaattctccctcctgtttaaatgaattttattagtatacttgtttaataagcaaaacttatgccaataccttaatgataaagcctttgtatttatttttttattgtaaatttattccagcgattaaatagcttataattacttacttttcaagtttaaaaatataatatttttttattaactatttaaaatatacattacaatataaaaagctattttccttatcttgcaaaaataattttaaaataggtttttataggataaaatcctaaaaaaacctattatttaatcaaatatataaatttatactactatttgttgtataatataacttaccttatactttaaatactttaaaaataaatactattttgttaggagaaataaaatggataaaaagaagttaatccttataacatatgataaattaaatagtgaccactacaaagaagaattaacaaacttttttggagacgaaataatcatagaaacacaaaatatacttgatggaataaaagaaaatttagagggagaggtagtgctttctctatcacctttaactagtaattttttaataaaacattttaaggaagatattgaaattattcatggaacgaaagcactttcaaaacttggatatgaaaaaatgatgaaactacctccaggtacaaaatcgttacttatgacaaccaataaaacttcagcatttgagatggctacttatctatataaaattggtataaatcatatagattttgtaccgacatatccagattgtgatgaaatatatgatttagatacagctataacaccaggtcagattagatttataccaaaatacataaaaaatattgttgatttaggttggagaaaaatctcattagatacatatatgtcattattagtagtattaaaactaaaaaatgagaaatttatagaaaaactatacaaattgtccaaggagacactaagtcatgatttcttaaatacgtcattagataatatatctaaattaaaaactatactttacatgaccattgatgaaataggtgatggtctaatatttttcaacacctttaacaaggttacttttgtaaataagtctttacttaatatgttggaactagatgaaaaacttataaaatcaccttccttaatggaatatatgccaaagagtttcttagataaaattacaaagaacttaaatatcgataatatgattatatacatagacgaaatagataaaaaattcatactttctaaaaaaccattttatctttataaaaatatagagggttgcttaattacattaaaagatgtaaacaatatagaaatattagaacaaaaaataagaagtgattctgtcaaaagaggttatgtagctaaatataaatttaataatattattggaaatagttctattataaaagattgtattaaaagggcaaaaaaaatggctcttacagataatcctatattaataacaggtgaaacaggaacaggtaaagaagcctttactcagtcaatacacaatcattcaaatagaaaaaataaaccttttgtagcaataaattgtgcttcattaccaagtgaattacttgaaagtgaactatttggatatgaagatggttcttttactggagcaaaaaaaggtggaaaaaaaggattattcgaattagctcatactggcactatatttttagatgagataggagatatgccacatgatttacaggttaaacttttaagagtcttacaagaaaaagaaattagaaaaattggtggtacaagtattattccaattgatgtgagaatattagctgccacaaataaagatttagaaaaattaattatagaaaataaatttaggatggatttattttataggataagtatgttcactttagatttacctcctcttagaaagagattagaagatatacctcttcttttagaatcatttttaaaagaacttccctataaaaacataaaactcgataagagtcttttagaagctttaaattcatacacttggatggggaatattagagaactgagaaattgtgttgaatatatggcttacatgggttccaattatcttacaataaatgatttacctcaaaacatatcttcaaaattaaataataatcatatgtcaagtaatatgtctatattcaatgatttaaaccaatatgacaaaaacatatgcatttctatcctaaaatcattgcacatgaaaccaatggggaggacaaagttaatgaaatttatggaatataatgtcacagaatacgaagtaagaaatatgctagaatatttgacacgcaatggatacttaatttctagtaaaggaagaaaaggctcatcaataactgagaaaggcataaaaataatagaaaataatataatttaaacctatagtaattcatctttactttatcaaaatttatatataattataattttttatttttctataaattttttataaaataataaaacttatttatattaaaaaagaagctatctcaacatagggataagcttctttttaattgttaaaaagataaaaatatatttgatttaacagaaaaatagtgcctcataaactaaaaagttcattttgagacacttccttaatattaataaattaattggcttaaaattactgattgataattataaagtacctctgttaaaggagtaaattctgaaccgattccaaatcttaattctgtaaacgcctctaaataatctgggtcacatacatcttcttgtgttaaatcttgtttcaccatttcagtagcaagataaattgctactgatggtagaaaagcatccattggcataggatatccaccaagtctatttgacataccaaaagccttagccttttcacttatcatgtcgtttattttatcataattttgagcatctttttcagatatttttagacccataacactaggatacgtttgtattggtgatggattgctttgctctgcaactatatactttaattctaaagccttagtcaatataacttcatccatatactcatttacaccaaatacatttatatcttttccatattttttaacttgtttttcaatatcttcatttaaaaactgcttaactttgtttttgtcttcttcagtatttatatttggagtattaacttgtacaaatggcaatcctatatttttacaagtctctttaatcatttctaatcttttggctatattaacatctttcaaatcatctgtagaggcataatgaataaaagcttttgctcccatttcttttgaacgttcagctaatacttttcctctttcctctgcactaacccctagattcacatcaacaaattggcttaattggtttttatcatctcccataggggcagaaatagttattatttctggacgcttttcctttaccttttgtaaagcaggtaaaagccctgcttggtcagttgaaactacaatagcctgaacttctttatcgtcagccaactttactatcttattaatagcactatctatattagaagtaaaattctctggcaatacaacatgttttatagtttgtttaactttagtttgaccatctttgtctttatcaattttattctcttcctcatattcttttgtcatctcttccaccatattgtattgtactttattttcagataatggttgagttaccactgcaactttaaaatcatctataattttctctttatctttcttgcctacaagtaaactacaacctgtaagtccaataattaaacatatggatagcataaatgctgttatttttctaagcattaattaaaacctcctaaatttgtactttcttatcactattactaattttatcatacttcaaagaaaaattatattataaaaaattatatacatgctattccaatccaatctaaaaagtactatgggtagattaggtttagattaaacctacccatagtactaaaaattaatatattataaaattaaattaattacaaattattatgctacttgtttgttgctttttataaagttaccaactattccacccaatatagctggtattacccagttaaagcccaaacctgcgagtggcaagctttgtataaatggaacagctcctgtcattccatttatagctgataatagactaatcactaatgtaacatatgctgcacctttaaaagcattatcattctttatatgtttaccagccaactccataacaactattgctaataaaacaggatatatagtttgtaggattggaactgatatagctattatagaatcaacacctaaatttgatataagcatactagctacacatatacctataaccagttgtttataactcgccttacttattccttcaaaataagttgatattgatgctgttaaacctgtagaagtagtcagacaggcaagtgccacaattacacctaaaattacctttcctacttgaccatataacaatatactagttatttcaactaataaagatgcttgaggtatactagtatcatataaagttgaaactgttgcacctaaataagtaagaccaccatatactactgctagaaatacacaggctacaaaaccagctttaatagtcattcctatttggtctttatctgatgtatatcctttagctattatagacatcaacattatagttgccatagatgctgcacctagagcgtccattgtttgataaccttgtgatataccttcaccaaatagatttttatctatcatatgctcaggactcataggtcctgctggagaaattataccctttactattaaaacaaataatactaataataacgctggagttaaatacttacctattatgtctataaccttagaagacctaatagtaaatgctaaagttaacccaaagaagattattgaaaatatagctttagctactggtccatggtctccaaatataggcataatacccatttcatatgttgttgcacaagttcttggtattacaagaagtgctaaacatgctagagcagctacactcattactcttgctaaccctttaccagctctcctaagtacatcatccatgcttcccttgcatcttgctgttgctataataacaagcattgctataccagcatctgcaacaacaaatccaataagaggaattaaccagtctttgccggattccatccctaaaaatggaggaaacataagatttcctgcaccaaagaacatagaaaataaagcaaaaccaactataaaaatatctctcatctgcttactcacactaaattaccccctttgaaaatattttgaatattaagataatcttactttattttcagaaaaatgtcaatctggtaaaaattcacacattgttaacgttttcccaatttattttatgaatatttttttcattttatgataattcccatcaatttcgttaaatcaattgcttgtgacacatcaaaaattgctcctctaatctcatctataccaatctcaattccctcaatattattagtggtaaaatctatgccagaaagtttagttccattaaagtttgctttttttaagtttgtatactcaaatactagattgtcaccttttacttcttgaaatacagaattttcaaaatttgaatctaagatagaaactatcttaaatttagagaatgaaaagttagaatacttacctaaaacatccttgaacaaaacgtttttaagtatacaatcatcaaatctaactcctatcaatttactatttttaaattcaactctgtatatacttcctccatcaaaaaatgaatttgataaattgcagttttcaaataccacatcaagtaaatcaatcttttttaaattgcaattttcaaaggatacatttctaaatatacaagattcaaagctaactcttacagaatctaaatcacttataacttcattttctataattttattaaatattttttcatcattaaatatatcttcaagtatatcttcaagattttcaataatttctaattctcctgtaaatttaggtttttgcactttaataattttagtcattttcccctccactataaattatattatttttgatattattttttttaatatattaacttaatatacatatttgatatattaaaaagtttttacgaaatatccgtgtattcagtacttttataattatatcacaaactcatttataatagacttctatataatagtataaaacaagttagaataattgacattatacttatacatattcaattattgaaaacagtaattcttgccaataaataaccttaattttttataaaatcgacaaaaaaacgaataattttattatatttattgtaaataatacaatattacgatataatacaacagaaaaacaaatagaaaatgttcatataatattagtaatacggtctaatagtttctacaaactcaccttaaatgggttttctatgaatagaatatcaactttgaatatatgttctattctatctatatgaatatatatttttttgtttatatcttaaagttttttggaggtaaaaatggtaccaaacactaacaatgtacaaccagatggaaataattcatcattaagctttttagacaaaatgtttaaatttagcgaacgtggctctagccttaaaacagaagtaataggtggagttactacattcttaacaatggcatacatagttttcgtaaatccagcaatattatctgaagctggaatggataaagccgcccttataacagttaccatactagctacagccattggtacacttatatttgcgattttaggaaatgcaccatttgctctagctcctggtatgggattaaatgcatttttcacatactctttggttataggtgcaggaatcccatggcaaacaggtcttggggtagtttttctatctggatgtgtcttctttacactcgcagtaacaggtcttcgaaagacaattgcagacgcaattcctagagaattggcagtagcatcttcagcaggtataggtcttttccttgcttttgttggtttaaaaaatatgggtgttataatagctaatccagatactatagtttcacttgcagattttacaccaacagttttaatagctctttttgctcttatcttaatggcaatactagaatataaaaaagttaaaggtggaatattgataagtatagtagttgcaacaataatatctgttatatttggatttgtggagttgccaacagcaataatctcaacacctcctagtatagcaccagttgcttttaaattagatattgtaggtgcattgaaattctcattaattggacctatattctctttcatgtttatagacatgtttgattcattagcatttcttattacttgttgtaaacaaatgggtcttgaagatgagaatggtgaaataaaagatttaggaagaatgttatatgcagatgtttcttctactttaataggctcattcttaggaactagtactgttacaacatttggagaatctgcttctggtatcgcagcaggtgcaagaacaggacttgcttcaatagtaacagcagcattattcttagctacacttatatttacaccattgcttggtatagttcctacttacgctgcagctcctgcacttgtaatggttggtgtattcatgtttgaaagcataaaacagattgattttgctgatagcaaaatagctgtacctgcttttgttacagttttattgatgcctttaacttatagtataagtattggtttatgctttggatttatttcatatataataatgcatgtggtagctaaagaaactgataaaatcagtattacactttggattataggtttacttgcagttgtaaacttagttctaagttaatattttaaatagttctaggtcaatattttaaatttataaatagcaaaatcaatttatgtataaattgattttgctattaactttgtatagaaaatttattatcataatacatagatataaaaatatatagaaaagaggttgtacttatgtcacaattacttataaaaaatgcatatctaattactatgaatgcagatagagaggtatatgaaactggaagtatacttattgaaaataatattataaaaaatgttggtaagtttgatattaatattgtagataaagatgctgagatatatgatgctaaaggaaaaatactaatgccagggttagtcaatacacacgttcacttatcccaacaattaggacgtggtcttgcagatgatgttgtacttttaacttggcttagagagagaatctggccatacgaaagtagcttcaactatgaagattcattgatttcatctactgcatgttgtgttgaattgataaaatctggggtaactacatttttagaatctggtggtcaatatgtagatgctatggttgaagctgttgataaaactggacttagagcctgtttagctaaatcagttatggatacaggagatggtcttcctgaagcatggcaaaaaactactgatgaggaaatcaacactcaattagacttattccataagtttaataacacatctaatgagaggattaaaatatggtttgcattaagaactatttttaatacaactgaagaattgcttattaggactaaagagttagctgataaatacaatacaggtatacatatgcatattgctgaaatagctgatgaaatttcatttgtaaagcaaaacaacggagttggaacagttgaatatcttgataaactaggtgtattaggaccaaatcttttagctgctcacacagtttggcttactcataaagaaattgatttatttagattacatgatgtaaaagtttctcataatccaggtgcagctatgaaagtagttctaggatttgcctcaattcctgaaatgttagaaaaaggaatacctgtttcaattggtactgatggagctccttcaaataatagaatggaccttatgagggatatgtatcttacatcactaatacataaaggtagaactttaaacccaactgtcgtaccagctgaagaagtcttagaaatggctactataaatggagcaaaatgtgctttactagaaaaagaaattggtagtcttgaagtaggaaaaaaagctgatatgattattctaaatccagatacaattcattgtttaccaatgcataatccaattggaaatatagtttattctatgactagtgaaaatgtagattctactatttgtgatggtaaatggttgatgaaggaaagaaaagtattagttgtagatgaatctgaattattaaataaagttaaaaaacaagcttctaaaataaaagataaagcagaagttaaaattccatctaaatttaaaatcataaaataacataaatttcaattgttttgtaaatatgaatatataaatatatttatacacatcatatatacaaaacaattgtttttttattttatattcattaacattgctcataaaatacaccataattccagaaaaaataaccaatcagttaggattacatcatctaagcaatatataaacgtcttagtttataagttttattctactcttatctaaaaccatctttaaagagttttcaactgtttcaattacatctttataactcaagtacacatttgcgtagatacaatcttcatataaattatattcagttactctacaatacagcagttttcctccatctaataaattgctcaaaatatagttttcttttcttgggacatagcctattacatatccagtttcaccaactattttaatagctttttcatcatatagattatctttctctctagttaaatagtatatcttactcttctccaattctttttcaagatattctctatttctaaaccttgaaccagcaacagctattgaagtcaaatagatatccttaccatgttcatctacttttattttttcaatatttacaaattctttttttaaattattactttcatataatactcttcttaattcatccttcaatataacatttttttctttttcatacgcttctttaacaatttttaattcttcaagagatagtttctctctgtatctttttaagatatttatggattcttttcttacttcatttatatttccaaatattccttttaaagatatattctttccttcaggatatagtgatttacttcctttaagcacaataaaaaataacatatcatcataatattcttgagtcaatttatctttttctatatctttcatttttccaattaaatcatctattttaaacgtctcttcaaaaaaatttaataattttaatctagaacttgtcgttccctttttagatatatgccaatatacctcaaaatctctaatatctctattcagatatggcaacaagtcatcaaaagataagtttacatcataaatttctgacatttttataatatcttctgtttttccactagcatctcttaatgcttcaaaatatatatttttccatttttcactgagcaagatatcatttatttctttttcaaattcaatcttattgtactctatattttcatcttttaagacgtttatagctattaggaaaattgaatataaactttcaaagttagtcccataatttactacagtaggtaaaaatcgattcactaattctaatttattacctatatatttaaattctacacttagcaagtaattgcatataagacgtgctaaattatttatcttttctttatctaaatctcgtttttcaagatattcattcaaatctacaattgaaataatatagttcatcaataatcgttcgtactttgtatccttataaccatcttcaattagataggaatttattttagaatctaaattttccatattaacaatagcaaatacttttattgaacctgtagcctttttagataaattaaataaatatgtattgtaaaattcaagttttttaatagtattactcagataaaatacgtattctccagatttagaaaatgtatctacaacttctcttaagttttctacatttagatatttctcacttaaaactaaccctagttttacatactcaacttttttactcttatatattaattctttagttaatttatataaccatttctcatcaataatcatttcttttaccaaagtatttatctttttcataaaaatttcgaaataacaaattaaagacttagaattactatcctccaataaataaatttcattagattcacttttatacatatttaaaatttcatctactagattatttgcaagttctacttgttctcttaacggtatactttcatatatacataggtaattcatttcaaatgattctttgtatccatcataaccattaaattcctgcaatcgcttaaaaacattctccaccaaattatcctcctttacatgatgtaatttatattgattatactacttatttcgtcaagtttacatttatacgcaaaaaaatattactagaaattgaaattctagtaatatccttattattaattatgtaaataccctatcttataactgtaaataatatccttattaattttaattacttttaataaaaatctatcctagatttagacttctctatgcatatattatactaatattagacatcataatcatacactttttctttttcatatctcatgtttacaaacaatgcaagtaaaattccaacaaatgttattgccacattaaacaatacaacatattttggtccattaactccccctgattttgtaataatacctgctatatttaaaataacatagtttgctatactagatgcaatcataactatagatgttatttttcctttattagttggaaacatttcatttgcagttgacgttgttaactgaagaacacctcctgctgctgaataacctattacaaatccccctaacatacaaatagttggagtttgaacaaaatatacaattaatagcataagtaaagctattataggatatataactaatattcttattggtttaatatattttttaataagtaaagaagttattaatactgcacatattactcccattgagtaaaaggattgaatttttgtagggtcagccatcccatacaatttacccaattcctgattacaatttaaccataatacaaatgtagatgtacatgtaaatccaatacaaacaagagctatacttgttggtgtaaatttcatcttctctgatttaactgttttgcctttgttatcaataacattattagctggtggaaatggtaacacagctatcaaaatggcatctactacaataagaatcgctgttactataaaaataactttaaatgatattgaatttgctgcaacaaatccaattataaaaggaagcaaaaattgtgctaaagctattgtaaatttagtaaacatatttgctattgttcctaaactagcaaatatctccatacaagaaggagttacacaggtatctaagaatgaatttgctgcccctccaattattgcaaatacatatgctatataaaaatttggtgaaaatacaattccaacaaagaaaattgcatgtagaaagtttcctataagaccacttacttttcttccatacttatctgaaataggtcctgcaaatggataagatataagtctccctaatcctagtgcagcaataacagctaaaacaatacttacatccaatgttccatctgatagtgttttagccccccacattgatgaaaattctggtttgtattgtcctaaaattgaaattccaataccaagtaaaaaatatgaaaaatacaacgctatggcagtaggataatattttttattgttcataatttttctcccattcttgttaatttattaacatttttgtgtacaataaactcatcctcataatggatttaaagtatagtcagttaaagcttcaaatttaactggactatgatgcaaaacccactatgacaatttgtaatttattattaaaaatattgaaatacgtatgttttttcattgtttaagatatcactcttatctatttaaagcataattcattaacttcttctacaggcatttctaatccagtatatagattaaaagcttctgctccttggtataataacattcctaatccaccaatagccttacatccattagcttcagcatcttcaatcatttttgttttcttaggattataaacgacatctgttactactaagtcttttcttaaaacactagtatcttttatatttgtttcattgtcataaggcttcataccaataagagttgcatttgtcaatatatcacttgattctatctcctcataaagtttgtttgtatcttctaaatcatatagattaacaacacattctggtacatctttttttatattctcaactgtctgctctgctcttttataaaaatcatccttagcattaaagatagatatttctcttgctccatctaaagcacattgtacttgtatagcagttgctgcaccaccagcacccataattgtaatctttttacctttaacttctatcccattttcttttaaattacgaacatagcctactccatctgttatatgaccaactaactttccattgtcatttacaattgtattacatgctccaattatacgagctgctggagaaagttcatccatatattctgtaacagcagatttacatggcatagtaacattggctccttttatattaaaagtttttattgctaaaagtgcctcttttaccttatctactgtgatatcaaaggctaaatatctataatctaaatctaatttcttaaaactataattatacatcactggtgatttagagtgaccaactggtgtacctattaatgcaaataatcctgttctacctgaaatttccataactataatttcctcccaatattatcattttctttgcaaataacctattcagttatttacaaagaaaaatttatttattatttatatatttaatgctacttcaaaagcttcttttgttgcatctaatgccctacgagcttttactgcatcaccaacaatataagtttcttttacaacttcttttataacttcacttaatgggtcgtaattacgagaacccatagcaagtactactgaatcaaaaccttttaaatcatgctctgtgccatctgtaagtaaatagtcgacaccatcatcataaaatttagaaacttttgcaccagtaatggtatgtatattataattttcaaaatcattcataaggaatttacggtgttctgaaattacatctgcaccaacttcttctctaagctcaataacagtaacctcatgttcttgttctccaaggaaggctgccacttcacatccaaccattccacctccaacaacaagtacttttttcccacaagattttttaccatcaagaaggtctacagcatgaattaatcctgaatcattgattcctggtataggaagtacaagtggagttgctccagtagctataataactacatcaggtgatttctcctttataagttctactgtagcttctgtattagtacatatttttacaccatattgattacattttgaaatataacttctaactaagttagtaatatctcctttccctggaggatatgcagctaaacgcatttgcccaccaagaacttcagatttttcaactaaagttacattatgtcctcttttagcacatacccatgctgcaagcatacctccaacacctccaccaacaacaagaacttctttgctaatttcagctggcttaagctctgcttcatgtcctaatataggatttgcaagacaggctataggttttccttggaacatatttggtacacatccttgtaagcatgcaatacatggtatcatttcgtctagttttccatttttagctttattaggcatttctgggtcagccaagctttgtctaccgaatgctactaaatcacatcttccttgtctgaccattaactcagcaaactgtggctctgtataacgtccaactgttattactggtatactaacagctttttttatttcagtaactaattctgcactgaatccagcatgtaaagtcgtaggagcccacatatattcatcatgtatatgtatactacgtgaaacatgaagtccatctattccacaaccttctagatatgctgctattactgaactatcatgtatatcaattcctcctggaacatcatcagtgctgtttatacgacataatattgctagagaatttcctacttttttacgtatattttcaatgataagacgaggtaatctcattctattttcaaaacatccaccaaactcatctacacgcttatttgttctttgtgatataaaactactaaccagatatccatgagcgcagtgaacttcaacagcatctgcaccagctttttgtgcacgtaatgcagcatctccataagattctataagttcatatatttcttctgttgttattgctagtggtgtattacgaccatttgatgcaggtattgcagaagcagcttttaatggatgtcctgctactttttcatttccttcagaaccagcatgttgtaattgtatagataccttcgaacctgcatcatgacaagcatctattacatttttaaaactatctattgtgctatcatcatataaacaaggcttacgaggacctccttttgcttttttgtctacaacactagattctatagttattaatccaaaaccacctaaagcacgctcaagataataagccttagaagtttcacttaaagtaccgtctgtgtttgcaaaattgtttcccatagggggaactacaaaacgatttggaactgtcattgaaccaattcttataggtgtaaacatagaactaatcttcataaggttttccttcctttcaagttttatatttaaaagttttatattataatactctgtatatttttatattatataagtttattttggagatacttcagaccatgctttatccaaaacttttttagttgcattaaatacagtttcagcagcagtggataaccctttagatattagagaatcagatattacttctgcccctatgactcttggtgatatattgtgttcttttattattttcacaaattcctctgtgtttccatatccttcacctggagccaaacggtcatgtagtgattcatccctaagtttttcataaggagtttctaaaacatcacacacttgaattgatactatcttatctgctggaacaggtgcaaggtcctctgctgtctgctttgctctagcccagtgccaagtatctaatataagcattgcattttcacgattacatcctttcacaacacgccatgcagtagccaaatctggtacaccactatatggcataaactcaagacctataataagttcacctgctctgtcacataattctcccaatgcagttataatttgttcttctggtatcatctctaataatccacaatttatatgtttaacattaaataagtgagccatatgataaacattttgctctttttctctttgagcttcagttctatcttcttctgttccccattgagttatatattctacttctgtaactttcatatcatattcattaagaattgcaatcatttcttcatctgtaacacctgcattttttgcatcaatataattttcagcacgcaatccaataccatcaaatccagcttcttttgcaatacgaactctatcacggaatgaaacttctgttcccaatgtataagaactaattgtaattggaatattaagatttttttgattattcatagcttaaatttgccccctttattttctttataattaatagtatctttgattttatatttttatttatcctactagtagtattattttaccttaaaaataaaagtattttttgatttctatttatctagattttataaatttattgtatcacgagactttactaataacaaattgataatttcctattaattcatagattttgtttatagattttatttataagataattcttgtatttttctattaggttgtataaatatatttatcttataattcagacaaaaaacgataaatttttttaaaagcttttattcttactctataatcatatataataaaaatgtaaaaatatcttaaaggttaacttctacaaatatataaataaaaatacctatgaaaggatgaacaaaaattgaatttatatcacttacgctattttgttacattggcacatttagaacactatacaaaagcggcagaaaatttatctataacacaaccaagcttaagtcatgctatttctttactagaaaatgaacttggggtggctctatttgaaaaagaaggtagaaatatagtccttactaagtatggaaaaatatttttaaaagatgtggaaaaatcattagaaattttagattcaagtgtaaaatcattaaaaataactggtactggtgaaggacaaatagacttagcttttcttagaacacttggtactgattttatcccagacatagtgcataaatttttaaaatctaatcctgctaaatcaatagattttaaatttcatactggtgtaactactgacattattcaaggtcttaaagaaagaaaatatgatattgcattttgttcgaaacttgaaaaagaaaagggaattgaatttatacctgttgccaaacaagatttagtactaattgtaccatatagtcatccactagctgcaaaggatactatagatttaaaagaaaccataccttatcctcaaatagtatttaatcagagaagtggtcttagatatataattgatgatatgtttaaaaaaataaatcaacagcctaatatagtctatgaagtagaggaagaccaagtaattgctggattagttgcaaaaaatttcggaattgctgtagtcccaaatatgaatatgcttagctttacaaaagtaaaagtaattcagattattcacccaagttgggaaagaaacttttacttagcatttataaaagatagatatttgcctcctgcaattaaaaactttaaaaactttgtcattaaaaacgctcaattataatttattaataaaggggttatttttaaatatcctcttttattctttttataaaataaaaaaatctatacttttaaaagtatagattcctaactgacagtcggcatccgagtctcagtaattatcgttatacaacagcaactggattcagttcctgaataactaggttatttacattatatcagatttttttaaatttgtcaattgtatctaacgcattttttcaagccatggtccaacaggctctacaataggaacttctttaaatccccaatttcttatatcattcacactcgttggagtatatattttgtttctgacagatttgaatattttgtttttttctccatattgcatacactttggattagcttctattaaccctcttcttgctctgctaagaggattacataaaatatctgctatttctaaaccttctctatagtcagcatcttcttttttggcaattataaaacccttaaccttatctcttaattcttcatctatatctaagtatattgttccattattaaatacatcaaaaaacgccttttgtacttttaagtttgagacatcatcccttgactctataactattcgtgcagattctacagtttcattatttacaaatgaataaaaattctgaagaacatgtataaaagccacaacatacggttcctttgaaggtgcataatatttctttaatctagctttatctactgttactgatattatagtacactctaatctagatagaaataaaggcaactcatcatagaataacttaatctgtgaatcatcaaacttctcaaatgctcttgattttcttgatatatctgtcaaatgtattcctatgttactggttccaaaacaatactctttaaatgcatccatttctttcctcaaagaacatacataatcgccttgacttactgcatatttatattcaaaaattactcctgtcaatgtaaatgggtcttcatgatttatatcagctcttccactttcatcaataaacattatatattttttctttataatcttactcaccctcttaacatatgatgatagcatctatattcattttatatgagttttaaaaatattccaagatttttatataacttaaacttaattttatactaaaaaattgagatgtaaaacaatcaagcttttattgattgaatttcacatctcaattataattatttttcaatatatatttttactattttgcaagaatatccattaatttatccattactatataagatactccgcctcctatttgataaggagtttcaacttttttatttgcaaatactctttgttgctctaatgataatcctgaattatccattaaaactattggtgaatgtaattttacagctaatggtccagctgataaagcatctactaaagcatctgatttactaactaatacagcctgtaaatcagtatctccatagaatttttctattactttggcattagtatctactctactatctccatatattctatttcctgaaatatcttcagtagttatatcattcatttttgctattactgaatcgttaattgcacttggtccacctataaagtatgcattttctaattttctttctgttagccatttataagattcttctgtaattccatctttattgactaatattataggttgtttttcttccccagctttagaagctacagataaagcatctgcttccccatttccagaaaccatatatgcagtttttatttcttctcgatttccaagttcttcagctattcttgtagcagtttgatatctatcttgacctgctattctctttgtctctgtgttgaaagtagtttttatttcttgctctaatttagaacttattgcattttctccacctatcaagattactgttttaggtgctaataacttcatttcttcaacagtttcagttggtaaattagctgtattagtaagtagtattgttgagtcatagctacttgctaaaggagttgctgttataccatcagctattgcattaccatttactaatattacagtatctgaactatcagcattccagtttccaactgaacttatctttttagctgtatcaaatctatttgcacctataattgtatcccatgtaggatttatagttccatcttcattaaaagtataatctttcccatctattttttgagaaccagttagcatctttccatctttgtctaaatagtaagacttaccatctatttgttgccatcctgtctgcattattcctgttttgtcaaagtaatacttattaccatctatttcttgccatcctgttactgataaaccatcagatcctagatagtatttctttccattcttttcttgccatcctgtttgcattactccatctgagttaaagtaataagtttttccgtctattactttccatccagatactcttgctccatcagttcctaaataatattttttgttattaattgctttccatcctgtttgcattactcctgaagcatcaaagtaatacatttttccatttacttttagccaactattcttttggtatgttccatcagattttacataatacttcttaccattttctgttttccatcctgtttgatttagatttatcttatattttgccgctatctttacatagctgtcattactataatctataattacatctgaacctacaggaacttggtcaaataaccatctaacatctttattgtgcattcttatacatccaccagaaatatgctttcctatagaactctcattattatttccatgtattccatatgtatctccataagttccttttaatgctaatcccatccatctatctcctaatggatttcttggacttcctccaggtatattacctttataatatggtctattttttatcttgttaactacttttgttttccctgttggtgtttctgacccctttttacctgttgcaactctaaattcttttacaagtttattatttacaaaatatcctagagtattctttcttgaatttactataatcacatgtttactggctgcgcttgattctggtacgccacatgcaaatactaaaactaaagtcagtgctagtactaaatacttttttagactttttttcactataacttccccctcttttagaaacattactacatgtgtctaattataacataaaattaccaataccttatatttacaaatttgttacatttatacatataagtatgtattctactcttcatacccattaggattcatactttgccatctccatgaatcttcacacatctcttcaagttcatacttagctttccatccaagctctttttctgcctttgaagaatctgcataacacatggctacatctccagcccttcttcctacaatcttatatggtatttcttttccacttgctttagaaaatgcttttactaaatcaagaacactataaccctttccagttcctaaattataaacaacaagtcctggattttcttctaatttttgtaatgcttttacatgaccagcagctaaatctaatacatgtatatagtctctaactccagttccatcatgtgttggataatcattaccataaacactcaattccttcaatttacctactgctatttttgttatataaggcattagattgctcggaactccatttggttcttcacctattctaccacttttatgagcaccaactggattaaagtatcttaaaagagctatatccaatgacttatctgcttttgatatatctactaacatctgctctatcataagtttagttcttccatatggattggttacagaaagtgggaaatcctctaatataggacaagtatgtgggtctccatatacagtagctgaagaactaaatacaaactttttaacaccatattctctcattaattcaaataaatttaaggtacttattagattattgctgtaatattcaattggtttttctactgattcaccaactgcttttaaagctgcaaagtgtataattgattcaatattattttctttaaatacaacatgcatttcatctttatttctgatatcaatattataaaattttactggttttttagataattccttaattctatcaaccactattgagttgctattacttaagttatcaactataacaacttcataacctgattctaaaagttctattgctgtatggcttcctatatatcctgctcctccagctactaaaactgccattgtaattacctcttttctaatattttatttttcacttactttttttctcatatagtccattaaatcatcttttaaattttctctctttagagcaaagtctattgttgcctctaaaaaaccaatcttatctcccacatcatatcttctaccttcaaagttataagcataaatagcctcttgttttccaagagtttgaagtgcatctgtcagttgtatctctccacctttaccaggtgtctgtttctctaatatactaaatattgcaggagttattatatatcttccaagtatagctatatcagatggagcttcttcaattgcaggtttttcaaccatatctttaactttatatactctatcttcgatatgttttacatccaatataccatatttattagtatcttctttagctatcttttgaacacctaatacagttgttttatactcattataagtatctattaattgttttaagcacggaacatctgaatctactatatcatcacctaataatacggcaaaaggttcatcacctataaaactttttgcacagtaaattgcatgtccaagaccttttggctctttttgtcttatataatgaatatttaccatatttgatatgtctcttaccatttctaacatctctgtcttacctttttgctctagttctaactctaattcaactgatttatcaaaatgatcttctatagattttttatttctacctgttattataagaatttcttcaattcccgattctatagcttcttctattatatactgtaaagttggtttatctactataggaagcatttctttgggctgtgattttgttgctggtaaaaatctggttcctagccctgctgctggtattattgcttttttaactgtcatctgcattttttcacccttcttcgtaaattttctattgtaccaaattaatataccatatttatactttttcttcaaactctatattatcccaatatttaatgctataagataatataaggtagatgaaatttcatctacctttagttttataagttaatattgtattgtttatattttatccaaaacttatacaggtactaaatttcatctaagatgccttttatatcactatctatatcttcatctagataagaatctaaatcttctaagtcaacttctagttcttgatatgtcatatcaacactgacatcctcatctatatccatttctgatattaattctcctaaaatactatttccatcagaatctaaaccactatctatatcttcatctatatagttttcatttaaaatttcatctaaatcaatctcgtaataaacttcattatttttttcatcccctgagtccaatcctaagaactcatagttaaaagtccaaacattgtatttacttgacatactttattcctcctgtgaaaaacatattttcatctagtttattggttccataatcaacagagttatatattttttcaattatgtcttttcttctttcttttgtactattatttaatgtcaattgtttaaatacatatgtatttgttattctctcgaataatatttcttttatactatcatcatcaatatttctatagtttttccacaataactcaaataacttaaacatttccctactagtttcatctacataataaggatacatattttctactaaatggtttaatcttgatatggcttgttttaaaaatacatcaagacttgcactttcactttcttttaacattctataattgtatttcttcttatcttctcctgaaattacaaagatgatattgtctaaacttttttcaacttcatttaaataactgcttatattatatgataagtcagacaatagatttttaatctgcttaaacacttgtacatcaagtttagtattatacttttcaaacaaatctatttcttgattttctaatattcttggcatatatgctgacaataaatctaaattgtttctttgttcttgtatttgcttataaagtgaatttataacttctattcttatttcatcatttaactctttttctaaaatcttatcaaattcagatttcatatagtaaatatttccaaaaaaattaaatattatcatatcattcatagctttagaccaattcttatatatcacttcaatagaattttctttaagtagaggttgctttgcatatataaatacatcttgcataagtttttgaaccatatttttacttaagtttaaaagtactttttgattattaaattttatttccgtttctacaaaattagaattttcgttttcaagttctttattaattacaatgtcttttatatcactattttttatagatatgatttctttttgaaaagactttagaatagtcaagctatcgaaatcttcttgaataaaaaatggagcatgttttaatgtatatcccactatttcattttctatatcttttaagtcatctatttgcataatttctctatttttatcatttatatgtaggttaaatacatttttattatcatataatattatatcttctcctaaatttaacttagaacaattatctttcgctgactttacaatagtcttcttagatttcttatttataaaaattaattggtcttgatattttactaaaagcatgtttgtgtttttataatcaaatccatctatatttcctgatatcttgcagaatactatatcacaatctttaggaagatttcctattttttggttatctttaactctctcatttaaatcagatggaactacactatctatattgttattaaatatagatacagaccttactataatcccctctctttccatatgaaagtatcccttcaatgacactcttttatcttctaaaatgtatctttctatatcatcaaaatttatttcaaatctatttttcccactgataaatataaacttctcattatctttattaattccacccatataaaacttattgtcatctaaacttaatatagtcatattatcctttagatagaatataaattctctttgacttttgcagattaaatcatattcatccaaagttattttcatagtcaaatttgctgtaacatttttacttgaattttcactttttatgtaaaaaggcaagttatttccatagacaattatttgagaatcttctaaaactgcctctaatttttctttattgtctgaaaaactatatatatattttacacctgtatcctcattaacttcatctgatttgctgattattatattccctagatttgttatatgaagctttttatattcttttgagtatctacttatgccactaagctcaaacccatcagaaagctcatatatgattttttctcctaatttcaacataccttcaccacctaaacagaattataagtattttataaaggtgaataaaatgtctcaaaacaaataatatttttttaatactttttattctgagacatagtttctccttttttataatgctctaagcaccttcaactatttcttcataaagtttatctaaatgtttaacatattcacgatatccagatttgttctttaactcacttcttaaatcttcatatttttgtttaagttcttcagcactcaaagaaggagctgattcttttaattcttctaacttataatcatagtacttatcatacatagctatatatgtatcaatagatttcttagctagttcattacatttttcttgtgcttctccatattgagaataatcacctatttttattttatagtatccattttcttgaattattgttgaagaaatacctttagcctcatattcttttgctgtttcttttgctgttttttcaactttaagtgaacctgcataaacagtgtaatatacacctttaccatctttatatgcttccatttcttttgctttcttttcagcttgtgctttttcttgagcctctttttcagcttttgccttttcttctgcttcttttttctctttttcagcttgtgcttttttctcttcctcagttaatttattgttagcttgttgttgagttgatgactttggaatattctctttatcatttttcttattgttgcctactgttataaaatatcctacaccaacaataaccactataactactgctataatagtttcttttaatctactcttcttagaaacaacctcttcatcatctaaagaatcttctttatctgatacataatttttcatttctttcttgttttctctatatttgtccttagaagaatttttagattttttattactattttctttctttttaataggtattactactgatttttcattttctaatttttcttcttttatttcttttgcttttttatcttctaagtttttactttctttttcaagcttcgattcattatttgaagatactttttcatctaagttattatttattggtttttctatttttacactacgttcttcttctatatgttgacttggttcttcttgttttatttcttttaattcattttgctctatttcttctgattttgcttgatgattttcaactggtttatctaaaattatatcaggagaaatatcatttaaattctcttcttcttgttcaacttcttcattgtcttttttaataaatccaaataatttagccttctttttactctttttattttctggttcaattatatcttctttattgctgtcgtactctttatctgtagtatctttatcttctacaacgtcacctatatcttgattattactatctacttcttctttagccccttcttcagcatcatcttctattgaaatactacttctaaagcaaatatctttatctgcattttttatcatgtaaatgtattcttcaatatcgatatctttatttcttctagttctttttgatgcaatttcatgattttctaattcactatagttatcttttattagattctgtgctttattccatgtatcttcactaatttctgttttatttttaattacatagtccacaaattccttaaaattttcaggaccaaattctccaattatagtcagtctcattgcaccttctataaggtctctatttcttctctttaaaaattctaatacaaccgttgcacaagcaaaatctttaataatttctttgccaaaaccatatccttcaacagaatgaagttcttctaatccacataacttcttatattcattgtgtattgtttgagatatactttcattatttaagctatttaacttatctataaacttcgattctatatcatttgattttgattcatgttttacttttgaatttttaatttcatttagtagcatgtcattttctgaattatctttacctaattgcaaatcctcaatttcagttgcttttatttctactttgtcttgttcgttattctcttccacattattaggtaccacatctttattgctagctaatattttgtttacacagaatataatttctctttttaattctcttttcgcatctgcttgatttttaagaaataaatctccacattctttcttttctaaacttatttttctaagagatatattaaggaggtctttatataggtttaaaaccttataatccttttctaaacgtcttcttctctctgatagttccattttatcataagctaaaaaactatttaaatcattggcttttagagagtctaatccctctttcatagccttatttacatactttctacattttgctgtagttaattctaaatctttttctaattcatctatttcaggtatgtacttatctactatccatttgccaataagtggttctgtatttcttgctaatgtcttataaaacaatatattaaattttaaaagctctgcatattttgcttcattaaattctactttttcaaatttcttttccaaaacaccatctagcttttcatttattttagactcttgttttaaaaaacttgctgtgacatttaaaacagtgtttcttattatattattttcactcaaaaccttcactccttaaatcaattattttattgtaatatttacattgtgcaaagttgctaatttgattatgatatctaaataattatttactaaatttgctacatcttatatcatatcatattatttacatcattttactttttctttttatatctatcttatattataccatttttaatatctgtactaacttatattacaatattcctcaaaattttaaaagtagattagacaaatttacaaataaaaaaacatcagtttaaactgatgtttttgactatcgaaataattaagcaagtctataagcggagttctgtattagataatcatctttctaggcctattgtcaccaataggctcaagcgacctacctaccggagagtacgagcagcactctttattcctatcttggtcttgctccaggtggggtttacatagccaactagtcgcctagctgctggtgagctcttacctcgcctttccatccttaccacaatagtggcggtttatttctgttgcactatccttaggatcgctcccactaggcgttacctagcaccctgctctatggagctccgactttcctcatgtaagattacatgcgattatctggcttacttaatatttattttacttagttatgttaacacaaattcttttacatgtcaaagtaatattatactaaaaatttaaatttattcaaaaatagtgtaatatagatatataaactccatttaactcgaggtgatatattgaaaaaattatatagaatagtaattaacattatactagtattagtaatactttacagtggatttaatatatactcaaaacttaccaaatacaatcatgatactaaaacatcctcagaacttcaaaaaaaagaatataaaaaagaggatttatcaaagattaacagtgattttaaattttggctttctgttgagaatacaaatataaattatccagttgtacaatctaaagataattcttactatcttgacaaagatttttataaaaaagattctatttctggtacactgtttatggattatagaaataaatctattgatgacaaaaatatcataatatatggacataatatgaaaaataaaactatgttcaacaacctaaataagtttaaagatgctgacttctttaaaaacaataataaaataaaaataaccttgaatggaaaagaatttttatatgatgttttttctgcttatattgtagaatctgattatgattatctaaaaacaaattttaacaatgaatctgattatcaaaattacataaatgatattacttctaaatcattgtataaatctcctattaaggtaaatagcaatgataaaatagttacactttctacatgtacctatgaatttgatgatgccagaatggtgattcatggtagattgatttaaaactcacagacacagtttaaaacaataattttaaactgtgtcatcttttatacctataatttataaattaggccactaaaagtatgtaatacaaaataacaaatacatcaaacaataaaaaacaataaaaaaagactatgctaaaaacatagtctttactggagctggtgataggaatcgaacctacaacctgctgattacaagtcagctgctctaccgttgagccacaccagcacacctattctattgtaaattagtaaaactaatttttaaaagttaacactctaaaaactacacatatatcttaatgaatgaacatcaaataaatattggtcaagtcctcgacctattagtatcgataagctaaatacattgctgcacttacaccttcgacctatcaaccagatagtctttctggggtcttacccttgcggtgggaaatcttatcttgaagttggcttcgcgcttagatgctttcagcgcttatccattccgtacatagctacccagccatgcccttggcagaacaactggtacaccagaggtacgtccatcccggtcctctcgtactaaggacaggtcttctcaaatttcctacgcctgcgacggatagggaccgaactgtctcacgacgttctgaacccagctcgcgtaccactttaatgggcgaacagcccaacccttgggacctactacagccccaggatgtgatgagccgacatcgaggtgccaaacctccccgtcgatgtggactcttgggggagataagcctgttatccccagggtagcttttatccgttgagcgatggcccttccacgcagaaccaccggatcactaagtccgattttcatccttgctcgacctgtatgtcttgcaatcaagctctcttttgcctttacactctacgtacgatttccgaccgtactgagagaacctttgagcgcctccgttaccttttgggaggcgaccgccccagtcaaactgcccacctgacagtgtcccaagaccagattcatggcctatggttagagtcccagtactacaagggtggtatcccaaggatggctccgccaaaactggcgtcctggtttcaaagcctcccacctatcctgtacatgtagtaccaagacccaatgtcaagctacagtaaagctccatggggtctttccgtcctgtcgcaggtatccggcatcttcaccggaattacaatttcaccgagtctgttgttgagacagtgcccaaatcgttacgcctttcgtgcgggtcggaacttacccgacaaggaatttcgctaccttaggaccgttatagttacggccgccgtttactggggcttaagttcactgcttcgattgctctaacagatccccttaaccttccagcaccgggcaggcgtcagctcctatacatcgtcttgcgacttagcagaaacctatgtttttggtaaacagtcgcttgggcctattctctgcggccacctgatggtggcaccccttatccctaagttacggggtcattttgccgagttccttaacaacagttctctcgctggccttaggatactctcctcacccacctgtgtcggtttgcggtacgggtacctttaacctcgatagagacttttcttgacagtgtgaaatcagctacttcgctactaaatttcgctccccatcacatcccagcattatcaaagcggatttgcctactttgactgcctcaatgcttgggcacacataaccaacagtgtgcttagcttatcctactgtgtcatcccttctctcaaacggttatcggtagtacaggaatatcaacctgttgtccatcacctacgcctttcggcctcagcttaggtcccgactaacccagggcggacgaaccttcccctggaaaccttgggtttacggcctgtgggattctcacccacatctcgctactcatgccaacattctcactcccatactgtccacatgtccttacggtcatgcttcaacccgtatgggaagctcccctacccatcattactgatgccgtagcttcggtagtaagttttagccccggaaatcttcggcgcaggatcactcgaccagtgagctattacgcactctttgaatgagtggctgcttctaagccaacatcctggttgtctgtgcaatcccacatcctttaccacttaacttacatttagggaccttagctgacgatctgggctgttgccctttcgactatgaatcttatcacccacagtctgactcccaagtataagatgacggcattcggagtttgatagtcttcggtaggtgcaataccccctaggacattcagtgctctacctccgtatctctcaccttgaggctagccctaaagctatttcggggagaaccagctatctccgggctcgattggaatttcaccgctacccacaagtcatccccgagcttttcaacgctcgtgggttcggacctccacgaaattttactttcgcttcatcctgctcatgggtaggtcgcccggtttcgggtctacgtcaagtaactgaacgctcagttaaaactcgctttcgctacggctccgcaccttaagtgcttaaccttgctacttaacgtaactcgttggcccgttctacaaaaagtacgcggtcacacaagaaatgtgcttccacagcttgtaagtgcagggtttcaggttctatttcactcccctcccggggttcttttcacctttccctcacggtactatacgctatcggtcactaggtagtatttagccttggagggtggtccctcctgcttcccacagggtttcacgtgtcccgtggtactctggatcatatctgaagtcttctcgtttaacatacaggactattaccttctgtggtgggtctttccaaacctcttcaattacgatacctcttcgttatgatatgtccgcaaccccaataaagaaaactttattggtttgggctaatccgcgttcgctcgccgctacttacggaatcgaatttctttctcttccttcaggtacttagatgtttcagttccctgagttcccctcattaagctatgtattcacttaatgatacttagacattactctaagtgagtttcctcattcggaaatcttcggatcaaagtttacgtgcaactccccgaagcttatcgcagcttatcacgtccttcatcggctcctagtgccaaggcatccgccctgcacccttaataacttgaccagttaaaaaggtttgatagattagaagctatcaacttcgataattttaaaaagttatcagctttatatattacaaattagatgtcatatcactaaatatatatgcagttttcaaagtgctaaaagtgctaattttgagtattcgtaaaaacgaaccctcaaaattaaacagtaggtaattctccttagaaaggaggtgatccagccgcaccttccgatacggctaccttgttacgacttcaccccagttattgattccaccttcgacgacttcttccaaaaggttagataatcggcttcgggcgtctccaactcccgtggtgtgacgggcggtgtgtacaagacccgggaacgcattcaccgcagcattctgatctgcgattactagtaactccagcttcatgtaggcgagtttcagcctacaatccgaactgagagtagctttaagggattagctccaccttacggcttggcaaccctctgtactacccattgtagcacgtgtgtagccctaagcataaggggcatgatgatttgacgtcatccccaccttcctccaggttatccctggcagtctctctagagtgcccaacttaatgatggcaactaaagacaagggttgcgctcgttgcgggacttaacccaacatctcacgacacgagctgacgacaaccatgcaccacctgtcaccaatgtccccgaagggaactctccgattaaggagatgtcattgggatgtcaagcttaggtaaggttcttcgcgttgcttcgaattaaaccacatgctccgctacttgtgcgggtccccgtcaattcctttgagtttcactcttgcgagcgtacttcccaggcggagtacttaatgcgttagctgcggcaccgaagggggtaacccccgacacctagtactcatcgtttacagcgtggactaccagggtatctaatcctgtttgctccccacgctttcgtgcctcagcgtcagttacagtccagagagccgccttcgcaactggtgttcctcctaatatctacgcatttcaccgctacactaggaattccactctcctctcctgcactcaagtctcccagtttcaagagcttactacggttgagccgtagcctttcactcctgacttgaaagaccgcctacgcaccctttacgcccagtaaatccggataacgctagccccctacgtattaccgcggctgctggcacgtagttagccggggcttcctcctcaagtaccgtcattatcttccttgaggacagagttttacgacccgaaggccttcatcactcacgcggcgttgctgcatcaggctttcgcccattgtgcaatattccccactgctgcctcccgtaggagtttggaccgtgtctcagttccaatgtggccgatcaccctctcaggtcggctactgatcgtcgccttggtaagccgttaccttaccaactagctaatcagacgcgggtccatcctgtactggctcacctttgatatttaagagatgcctctcaaatatattatcccgtattagcatacctttcggtatgttatccgtgtgtacagggtaggttacccacgcgttactcacccgtccgccgctctttaccgaagtaaatcgctcaacttgcatgtgttaggcacgccgccagcgttcatcctgagccaggatcaaactctcaaataaaagtttatcaggctcagatactattgttatcaaaatatctggctttatggtttgtttcttgttttataaattaacctactgtttaattttcaaagttcatttcattcaattaacttctttgtgcttgttattttgttacttcttgttgagcacatttattataataacatcttctcataatatggtcaactatttttttcatttttttttaaatttattgattattcaccctttgtcatactattgtgactttatttttaaagatataactattattaatagtaatttccaattataataatactatatgcaattattattaatttagaaaggagcttcaaaatgtttagaaaagtattgcattatttaacactactttctatttctattttttttattgttggatgttcaaattcacaaaacaatcaaaacgaaaatcaaaataaggaaacacagttacaagaagataaggaaaaaatagatggtggtaaggatacttccaatgtaatagtttcagacggaacagataaaccatcaaaagccactactaataatgataataataaattagatgtatcttctttagataacactactcttgattggttttatatacctaacaataagcataaaacaccagaagtaaatacggacattgaatttaaattttctgactatgatgccctatacaatggacctacaaaagatggtcaaaaaacactatatcttacatttgatgaaggttatgaaaatggatacactacaaagatactcgacactctaaaacaaaaccaggttaaagcagttttttttgttacagctccatatataaaagaaaataaagatttagtaaaaagaatggtttctgagggacatatagttggaaatcatagtaaaacccatccatctatgccaacaaaaacaagcaatctaaaaaactttaatgacgaattatatgatgttgaaaagttatataaagatgtaactgggaaagatatggttaaattttttagacctcctatgggaaaatactcagaaaaaagcttggcaatgactaaaaatttaggatacaagactgtattttggagttttgcatacagagactgggatactgataaacaaccatcacatgaagaagcaacgcaaaaaataatggataatctacatgatggttctatcttgttactacatgcagtttccaaaactagtacagaaattttaaatgattttatatcaaatgcaagaaaactaggatatgaatttgaactcttggagtattaatatttagaattacatctaaagtctacaaactaatatagttaatataatatagattataaaataataaattaaaattaaaatttttgtttggtgatagtataggtaaaaaacttgcgatagcttatatatgttggtgggacagggtaataaaacatcaaaaaatttggcaagatattaaacatagataacagtattttagatgttatatttagatgttatgtatagtataatgaaaaatattattttattaaagaatactaataaaaatatcaataaaaatagatgtatggcttaaaattagtaaaacaattataataaattatagctacacatctatttttaatttgtacaattaaagatttattcgatttattaaataataaacattgctactatggttgttacaaccaatccggttataactgggacaaagtttcgctttgccaactctattggactaaccccacaaattgccgctgctgaaataagaccccaaggaactagacagcctccacctacccatataccactgatttgtcctaatgcagctaatgcaccaacacttgcatttatagcagttccaaatacagaggcaagtgaaccaactaatgaaatcccagaaaatccagaaccatcaagcccagttattgcccccactacagtttctatacctgatacggcaaatttattaagtggtattgtttgagaaagagctatgcctatatctgataataaaccttgtgaacctggtgctaatacttttccaaatacacctgtcaagggcgcaacttcacccatatagaaaaatgctgctattggtataattgctccaaatatttttatcccaaacacaaaaccatcaattatattctcacatacattttcaagactatctttgccaaaatttataacatttataattattattaaaaatactgctgttccacccaaaagagctgatgcatctcctccttttaggtcaaatatatacataacaattatatcagcaagaaatcccagagctactaaaatagttgctattttagattttccattgaactcttctacttcttcactttcaaaaccttttagttcttctctaaacattcctttgttaatatctctttttaatgtataaaatgccatagatatggttacgattcccatcacccaaaacaaaatcataccatcatttataacatatgatactgcaacacctgctgcaccagctgttatacttggagctccttgaataacaaagtctgtagacaaggcaagaccatgaccaaataaatttaatgctactgcaacaccaattgctggtagcccagctctcatagcaacaggtaaaaatacagctccaactaaggcaacagctggagttggccagaaaaaccaagaaagaactaacataacaaatccagttacaaaaaatgctgtattagaattttttataactctcgaaaatggtctcaccatatactgtatagcattattggcttctagggctttagataatgcaaccataatagctataatcaagataattggacccaactcatttaaagatataataaaagagttaaacactgctgttatagcaccaaagatgtttttttcaaagaacaatcccataaaaaaaacacctaatatacatggtactattgtatcctttttcataatcatagtaattaatataattaccataaatagaatgtaaatataatgtgctcctgtcaaaaccatattattatgtcccctttttttaagataataatattatatggtcttgtaagtaaacttgttacttgcctagaggtacacaatattgaacatcccataactaaagtcacatgcttcctgcttcatagaattttacataagcaattacacaatatataatagcaattacacaatatataatttaaatttttatgattcttttgctggaatagatatttcaatagcaaattctttatcatctgaatttacatttatgcttccattatgatatgcaactattttctcacaattctttataccaattccaaaactttctacattcttagaaaaattacttactctatttttttgtataattagtaatttagaatcctctactttaattaaaaatactataggcttatctttcctagcatattttattatattagaacataaattatcaaatatccttctaaattgtgtaacatctacataaatatgatattggttataaagttcattttctattgttatatgaaatcctttctcctccaatgtatatgaactatctaaaagtaattgaaaaataaattcattagcatttattttttcatacccttttgaaacttcctctccagaattaacaaaatgcgtaaaaaggtcatctgttaaatcttttatttgatatgctttagaccttacattttttatgtattgttccaattgctcaggactattgtatttatggtctttgatcaaatctaaataacaaattactgatgttaatggagttctaacatcatgtgatatcgaagttactatatctttatttttattcttcatctccctttcttttataagttgattctccaatgtatgactcatctcattaatactagatgcaagtgatgataattcatcattaccttttactgggattctatactttaaactgccactctctactatctttatacccatttctattttccttaggtactttatctttctactaaacaacagtaaaaatgttataataaatgtaagtgccataaatgtaatagaaattgcttctataaaattttgaaatctaaatctaaataaagctactacaactatattagctttaatatcagaaaattgtatctcatagtttctagccatgggactgctataaaactcattttcctcactcttatcaggtacttcattaggatagtataatgtatcataaaaaaccttatttcctttatatatcttcatagaaacaaaccaattatcactattccattttgctatatcatctccatcatctgctcttataccattgttattcacataagtttgaaaattatccataagttgatttacttctcttttaaaatatactttcccttctgatacatcttttactatagattcaacagcagagtaaaatggtatatttaaaatgaaagccactgcagctgagattactacatatatcaatagtataactcccaacttagatggcttaattttgttaatcaatataatacccctttccccatgcggtttttatatattgtggatttttttggtctttttctaacttttttcttaaatttctaatatgaaccattattgtattatttgccgtataaaaatactgctcatcccaaatagtttcatataaattttcagacgaaaaaactttttttctatttttcaacataagaattaatatactatattctatagttgtcaaaaacacaggttctccatttagtgtaacatcttgagtatctaaattgacacataactcttttgtttttaatatatttggctctctttccttttcctttccctggtatatataataacgtctaagtagcgacttaacccttgaaattagttcagaatatgaaaaaggctttgataaatagtcatctcctcctgctgaaaatccaataactttatcagagtcttgagtttttgcagttaaaaataatattggtgctgtcgttttttctctaatttcattacatgcaacaaatcctgtttttacaggcattacaacatccaaaataatcaaatcaatcgtactatctactaagtttacagcttcttctccattcgttgccataataacttcataaccttcaccagttaaaagtatttctacgatttccctaatctcaggattatcatcagctactaaaattttttttggaatctctttattcatcaccaagctcctttttttgctatatttcttaaatatttcaaactatataaaatattatactttattagcaaaagcttagcaatgtcacacgttttaatagtttatactcctgtaaacatgtttaaaacttaattaaaatgtacacacaaattgacatattaataaaaataatctatataatattatcttacataagcaacttttttcactgcttttactttttcagaagattttacatgtactactatacatatcaatccacttatagctacaaatgcataaaaacttattcccctactaagtaacattgccggaactaataagtgaccagggaaaaatatcttaaataatgtcataaaactattttcagaagctccaacagcccctggcaatggtaatgaagaaacagcaatattaagcaaggattgtatcgctaatatctcaaatacagtatatgttgatagatgaaaagctttgtatacaaagaaaggaactaaaaacatagctgttatttgtacaatagttatgactaaaatttggactacaagttttggattctgctttatatattgagcacctttaacatactcttcaatttgagatattataacttttcttgaactttcaacatcttttattattcttaacttacctaataaatttgttattgatattataaaattgtttacaagtttttttgaaaatataattgcaattactccaatgacaagagcaacatttgttattacaccatatattagtaaaatgttcataccacttacattatttaatataaactcacgttccataatgaacattattccactatatgccagtataactacttggtgaataacaacaatgactaatagtataagtgaagaatatgatatatttatatcgtcttttttcatataataaacttgtgctggttgaccacctgatgctgaaggcgtaatagaactaaaataaaatccaataaaagcatatcccatacattttaaaagagtagttttttggtttaaagctttcatacctaagtatatatttataccttcacaggcaacatatataaacatcattgcaaatccaattagtataaacatagggcttgcaccttttaatgattttatcaatgattcaactgactgccctctaaaaacaaaatatcctgttatgcccattagtaaaactaaaaaagctacactacctaggcatttatttttcttttcagttttacttatcataactacatcctttctggtgttacgaactttaaaccactggctttaagttttggaatagctatctttaaagcttcaatagtacgctcaggtgcacctactgcaccacctgaattttcacctgcatcatgtaaacaaattatagaattttcttttgttctactcattaacttgtttataataatgtctactgtactatctttctcccaatcttctgccattacatcccacaaagtcatttttagattatattttttaacaaatgaatttgaaaatatattagtatgaccccatggtggacgatagtagtttacatctacacctaaatttttcattatatttgtactttcaataaaatcttttttaacataactataactataaagccatgcatttctgtgttccaatgaatgtaaaccaactatatgattttctctcaacattctttttataatttcaggctctttttcagcattctttgctactacaaaaaacatagcttgtatatcattttcttttaacacatctagtaatttttctgtatatctcttatctggaccatcatcaaatgtaagtgcaatttcattttctccagccatattttttaatacctctttatttaatagtttattatagtatgtaggtataattgaatggactaaaaaaatcaatgcaacaacgataattaaacctactacatacattctctacacgctccttgttcatcaagtgaaaataaaatattctctaaggtattattgtcaaattgtttttttaattctttcatgttactgctcatttctttaagagtagcatcatcataaattaaatcttttatctcatctacatagtattttttatttttaccaagtattctcccaatttcattatttaatataaaactagcattatctatctcttgttgtaaaaatggattaaatgccaatattggaagttctgaataaattgtttcaaatagtgttattccacctggtttagaaataataaggtcagaatctttcatatatttatatacttcattggtgtaacctactacctctatattttcatatctaccatatagtttatagtacatttttttattattaccagttattacagtagtttttactccttctaaactatttaattctttgtaaaattgttctgatttaggcagtaatcctaatcctccacccattataagaatattttttttagttgaatgatttacatgttctattcttttaaattctttttttactggaataccattaactttaatcttagattcatctattcctttaaaaacaagttcttccttagtagatttactagctactaaataacagtctgtatttttactaatccattctgagtgactacttatatcagttatgcatgttattaaaggaagatttgagttatatttttccttatatcttgatactaattgagaacaaaatggaaaagttgaaataactactgttggttgtacttcatgaagtaatgtatctaatttatttaaaaaataatctgaaaaagtaaattttatatctttctttccattttcagcacatttataaaacaaattataaagactacttccccgatttacaagaatagaaaaagtcttgtacattttatctgaatagttaggcataatgtattcaaatatatctttaattgttatttctgaattatcaaattttgcttttatatcttcacttaaagaatttgatgctgagtaatgacccataccaaattttcctgtaagaattaataccttcataagattccctcctcgttaaagcttttcttttcatatgattactatacttataagtatagactttaaatctttagaaaaacctagtataattcttaagaaatcttaaagttttaattaaaaaatacaaagagaccatctaaaaatagagataaccatattttttattatttaaataacacaaatatgttcgattccatacaaaaaagtgcctcataaactaaaaagttcattttgagacaccttttttatatctaaatatattcaaatacatacacaatcattgtaattatttaaatgtattttatttagttgttctttataattaatccataatattatattcttcatataaaggatatttttcagttaaaccaacaaccaatgttctagccttagattcttcatcataagttaaacataggtctatagcctcagcgattattgccatatcttcttctttcatacctctagtagttacagctggagtaccaagtcttattccacttgtaacaagagcaccatttggatcaaatggaattgtatttttattagctgttatataagcatcatccaatctcttttctgctgctttaccagttatatttttattaatcaaatctaatagtattaaatgattatctgtacctccagaaatcaatttaaaatctcttttaataagttcttcagctaaggcttttgcatttttagcaacttgtacctgatattctttaaactcatcacttaaagcttctttaaagcaaactgccttagaagcaattatatgttcaagaggtccaccttgaataccagggaatattgctttgtctatgtctttagcatatttttctttacaaagaataacacccccacgaggtcctcttaaagttttgtgagttgttgttgtaacaaaatcagccacttcacatggattttggtgaataccagcagccacaagacctgctatatgagccatatctaccataagcaatgctccaacctcatcagctatctctctaaactttttaaaatctatttctctaggatatgcacttgctcctgcaactatcattttaggttttacttcatgtgctatctttctaacttcatcaaaatctataagtccactgtctttatctataccatattcataaaatttataatattgaccagaaatattaactggagcaccatgagttaaatgtccaccttgagataaattcattcccataacaacatcacctggttttaacatagcaaaatatacaccaatatttgcatttgctccagagtgaggttgaacattagcatgttctgctccaaatatttttttgattctatctattgcaagagtttcaacttcatctatgtattcacatccaccataatatcttttgcctgagtaaccttctgcatacttatttgtaagatgacttcccatagtttccattactggaactgatactatgttttcagatgctattaattcaatatttctttgttgtctttttaactctcttttcatactttcataaatctcaggatccgcttttttcaagttctcaaacatattactcctcctagttattatttaaattttatttttacagacatttcataattttcgtttttatcaatatgataatttattattatagtcctttaccaattaatagtcaagtgttttgccatttttccatatttaacatagttactttctttatttttaagttaaaatataataaataatattgtctaattcttttaattggatataatttaaatgtgactattttgaaacaaaaaaaagataatatatttatatagatattaaggaatattacttaaaaatttgatataatttcaatattacgttttttaatttggaggtgtatttatgaatcaaaatgaggaacttgaatataagaaaaatattctaaaactagctctatttgtaggggaactgatgataaaaaatggagctgaaacatctagggttgaagacagtgtccttagaatatgcaggtcaagagggttttatcatgtaaatatttttacaactcctacagtaataattatttcagatgagaaatttgatggcttttcgtttatgaaaacgattcaatcaagaggtataaacttaaacaagatttctttattaaacagtttttctcgagaatttgttagtgacaaagagtatgatattgataatgccattgcacgtctttatgaaatccaagatgtaaaaccttatcctttatggttattttactcttgtacaggaattgcatctgcttgttttgcttgtttgcttggagggaattatgtattaaattttatacttacgtttataatagcaatctttgctgcaattacttatgataaaacgatgaagataagtgcaatatctgcattttcctgtttagtatcttcttttttaattgcactttcaggagttctactagttgaaataggcattttagatgaccctaaaatgcttatagtcggcgctataatgccactactcccaggagttgcttttataaaagctattagagatttaatatcagggaatttaatatcaggaatttctcgtgcttttgatgctgctatgattattattgcaattgcttctggagttggttttgtccttgatacatggtatagaataggaggtcctttctaatgactgatatgtctatgattttgcattttttattttcaggtgttgcaactgctggatttgctgttttctttaatgctccactatatctacttcttccagctggagtaactggcggaattggttggattgtatatgtttatttatttaattttactacaaatgcagtttttgcaggttttattgctgctgctttggtctcagcgtgtagtgagactttagcaagaaaactaaagcaaccagctattgtgttcgtaattccaggtattcttcctctaataccaggaattgggctatataatacaatgttgtctttgattcagaaaaattattctttggctatgtcaaaaggtacagatgcgctatttctaagtgctgcaatagcacttggtgtattagttgtaacttcttttgtaagaacattgaatcttttgaaaatcagaaaaaactttattccttacagaaaatcaaaataaaaatataaaaatagcaatgtacttaaactctacaaatacgtattgagtatttatttaaaaagcacattgctattttttaattataattatcttaaaggtcaattaatattcttgttattactggtataaattctctactgtctctaaattttttgtcattcttctttaagtataaataacagattattgtaagacaaattccaactaatccacttatggcttcaactccagttgtcattccaattgcccccaatatataataagtccctattgttcctacaagaagtgctataagaggtattatataagccattacagctgcttttaatacattcatattatccatactcacttctacatggtcaccaacttttgcaccaattgtgttgtctacttctactaatatttcttttgactctgctgaatttgtagtagcacattttccacaagcagcacaagctgaatgtctttgcatttttaactttgcagttctatcatcaacaatttccataataaatccttgttgattcataactaaccgcctccttattttgtaaatttatttatagtatccataagctcttttatcatctcttcagttttatcagcatcatcatgtttaatgctttctgctacacatccttttatatgattctctaagataattgtgcctactctatttatagcagaccttatagcagatatttgaaccaatatatcaacacaataacgttcttgttccaccatcttttgtatccccttaacttgaccttctattctttttaatctttttatgagagcttccctctcattgtttggtgctaattttctttcttccataaactcacctcatactctaatgatgtcttatacaattatgctctacttaccaacttgtttaaaatataatacggttattattactataaatgccaaaattgatattgcaatagacctactttgattcttagtttgttccatacttaactttccattcatcttaaatcctgccaatgggaataaaaatataaccagtgcatcaattccaagtacaacttgggctgcaatagtccatttactcaaaaagcagaatattccgcccacacctaaaagaacctctaatatatttataaacttatatgtaggtttttttgctatatattcttcaattttttccttacattctgcacgacatggatatatattcatattgtcatcatattttatagctaatttattatttggtgactttatatccctattacagtaaagacattttttcattttatattctcctctagtcttccttaaaaaattttgcctaaattattatacgctctaatactattataccaaatagatacaaaaaacaaaaataaaaggaataattttagctacttcttttacttcaatgtgtagtctataataaatttataataataattaaataatattatttaatctaatttaattattatgtaatctaaaataagtcaaatttgtatgagaggttaaaatgaaacaaatggaattagctattgtaagtttaaaaaaagacgctggagaaatttatgaaaatcaaataaggcaattcttaggtgataatctaaagataaatttatactcatttgaagagggaaatttaaagttttttaaagaaaaacttatactcctatctgcttatttaaaatacgatgaaatagtaaaattatctcactatgatgctcaaatcattgttcccaagttgacatttgaaaagaacagtattgatatgatatccaaattagaaaaagataaaattatttatgtatataacttaagtaaagatatggcaatagaaacaatttctttaatacatagattaggaatagacaatataaatatcctgccctgctatccagagattgagtttactcccacagatgctgtaatcctaactcctggcgaaaaaatcctgcctaagtttaaaaattgtgaagttgtagatttaaaatacagaataatagatttaagttgtattgttgaaattgctacaaaaaccaaattaaaacatctaataaaagatgacctaataaaaaaatacgtagaaaaaataattcctacaagttatagtacaggtgagttattgttagatgcaaataagtttgaaagacaatttgatttgttactatctataattgatgatggaattatatgcacaaataatgatggaataattcaattctataatcatatagctagaaaaattttgtctataaatgcaaatgaaatgattgactcatttgttggtgattgtataaaagacatcaattttcaaaacatattgaccaataaaactccattttttgagaaattgattaaaataaatcatattgatataaatttagagattaaacatatacaattaaatgtatttgatggatttatactaaagatgacaaagttttctcaattagaaaaaaagcaagctaaattaagagcacaactagtaaactctggtaatatcagtaaatacacatttgatgatatattaggttctagtatacaaactattaatacaaaaaaaattgctaataaaatggctcaatcaaattcatctatccttataattggtgaaagtggtactggtaaagaattatttgctcaatccattcatagtgcttctaggagaaaagatggtccctttgtcgcagtaaattgtagtacttttcaagaaaatctactgcaaagtgaattatttggctatgatgaaggggcttttactggtgctaaaaaaggtgggaaaattggtttatttgaattagccaacaatggaactatatttttagacgaaattggagaaatggatttaaattctcaatctaaattacttagagtcatacaagaaaaacaagtacgacgtattggttctaataatgtcattgatattgatgtaagaataattgcagctactaatagaaatttaaaagaacttgtatctaaaaatatgtttagaagagatttatattttaggttgaatgttcttccccttaaaatacatccacttagggaaagagctgctgatatatttgaaatttttggttcattaaaatatgatattccatgtaattttattctaagtgaggaagtaaaagaaatctttaaaatgtatagatgggaaggaaatgtaagagaattaagaaacttaggagaatacttctgttacttgggaaaagatattatagaaatatgtgatttacctgaatatatattggacactatagattcaaattatagtagaaccgtttgtaataaagtaagtgataatataaaaaagtatcaattcaacattggcaaagacaaaaacatcatgaaatacgactataattttaaaaggtcactagatgaatacatatttatattggataatttaaaaaaggcttatgatttaaaagaaagaataggtagaaaaagcttatgtaaaatagctttagaggaaaatagatttttgacagaacaacagattagaaatatgcttttagaactacaagactttgggcttgtagacatacttgttggtcgtggaggttcaattataacatcaaaaggagtagaatttctaaaaaatataaataggtctaacaagttaaacagttaaacctatttaacctatttaattacattttcatatatttaaaaatttattagaaataaccttttccacaaagttttaagtataattaatatttttatcttatctatgctctgaaattacttaatattaaatattaacttgtgaataaatattttttattatcaatattggcacgttgtttgcttaatattattaacataaaattaaaattactggaggtatttacaatgaattataattttaatgagattgttgatagaagcaataatttttcatctaaatggtcagaaatggaaaaaaagtatggaactaatgatttacttcctatgtgggtggctgacatggattttaaggctgcaccttgtataattgattccttaaaaaatagactagaacaagagatttatggctacacaacaagaccagattcttacaatgaatctatagtaaactggctagataggagacataactggaaaataaaaagtgagtggttaatttatagtccaggtgttatcccagctataagtcttttaataaatgaactcacaaaagcaaatgataaaataatgatacaagaaccagtttacagcccttttaatagtgttgtaaaaaataacaatagagaactaattataagcccattacagaaactagaaaatggaaactatataatggattatgaagacattgaaaacaagattaaagatgtaaaattattcatactttgtaatcctcataatccagttggtagagtatggacaaaagatgaattaaaaaaactaggagatatttgtcttaagcataatgtaaaaatcatatctgatgaaatacatagtgacattatattaaaaaaacataagcatattcctatggcatctatttctaaagaatttgaaaaaaatacaattacttgtatggctccaactaaaacttttaatatagctggtcttcaatcatcatatgtaatactacctgatgaaaaagactataaattgttagatgatgcttttaccagaattgatataaagagaaataattgctttagcttagttgcaactgaagcttcatataataatggtgaatcttggctagaatcatttttagaatatttagaatctaatatagattttgctataaaatatataaatgaaaatatgccaaaacttaaagttagaaaaccagaaggtacttatttattatgggtagactttagtgcacttggattaagtgatgaggaactagaaagtgtacttgtacaaaaaggtaaagttgctctaaatcaaggaaacagctttggcattggaggaagtgggtatcaaagaataaacttagcttgtccaagaagtatgcttgaagaagctcttataagaataaaaaatgcaattaaataaaaatatttaaggagaatttgcactatgaaaatgaatacagaaagaaaaataccttcatttagatattccttgttagtaatgcttgcaataatagctctaacatcagttggtatagttgtatttaatgcttctataactacaatgtttttactttcatggcttatagtagttcctgcagccacgaaacttggttatactaatgatgaaatagaagcttttggatttgaagttggtaaagatgcctttcaatcaaacttaattatactttctgttggtgtactaatagcagcttggatagctgctggtacaataccaacagtagtatatagtggactaacaataataacccctaaatattttctgcttacaacattaatcgtatgttcattaacttctgttgctactggtacatcttgggggactcttggaacttctggtatagcaatgatgagtattggtactagtatgggtattcctcttggtttaacagctggtgcagtcatttctggtgctttctttggagataagatgtcacctctatcagattctacaaacttagctgcagcagtttgtaagacagatgtaattacacatatgaagcatatgttttataccacaggacctgcatacgtaatatgtatagttctgtatacagtaattggatttaagtattcaaataatactatagactatgttcaaataaatcaaatcaaggatgtattaaattcaaactttcatattggtttagtagcaatgattccaataatatttttattattacttttattgctacaaaagccacccattatatctatactaagttcagctatcatgggacttattatagcagtatttcaagaaggagaaaaaataggtgatattttaaattacatgctatcaggatttactatagatactggatttgtctatgccgacaaactattaaatcgtggtggaataatgagtatggctgaaaccgttttactagtatttgtagttttcgttattgccggtattctccaaaaaactggattcttagaagtactgcttcaacctcttataactaaaataggaaaatcaagaactaaattggttgggtctacttttatagtaagctactttgcaaatgcatttagttcatcaatgatgtttacttctgtatttgtcggaactctaatgtctccaatatacaaagagtttaaattaaaaccacaaaatctatctagaattatagaagatacagctacacttggtggtccattaataccatggaattcaaatgctgttttctgtgctcagactcttggtgtaagcccactagaatttattccatattgtttcttaagttggattacacctataatttcatttatttatggtgtaactggttttactatgcttacatacacagatgatgaaattgaagagttagaaatatttgatactgctcagagaagagttgattgaatatgaaatttgaatactattacttaattcaggatattgcaggtatattattggcatttataggacttagaatgtctattattggatttaggatactttctatgaaggggatttctataaatacacttttaattgtaattaaatactgcttatttaccatagcaggactgaatttattaatatctaagtttggaattagacactggatttggagtgtttgtatgttgataatatccataataataaatcccaggattaaggtatcaaaatagaaatagttattagacttaaatttttataaaaaaactgctttacaaattaaagcagttttttattgttacttataattaaataactggtgtatcagataagtaatcattacttacataaccatatccaccattatactttatttttacccatccagtagcaaatatttctattgtttctactttgcttccatatgaaaggtgacctattttttcatcttctgtacttggtcctttcctaacatttagaccatctttttcttttacatactttatttttatattttcattactattatcaggcttattatttgtcaaataagacccactaacatatccaataccttcattgtattttatttttacccatccagtttttaacacatctaaaacttctacttcatcaccattatttagatatcctataacagaagcttctattgtagcatcatttcttatatttaccttatctgtattagttacatacattactctcttattgttactatttgcctgtaaatcttttaattctttaaatgcattttcatttcctccactaccaacttgagttatagaggtagcatttttattcaaaaatacactcttttgtgttgcacttaattgttctcctacgattagtacaggagaattttcttttgatgccagtactcctactgctagagcgtctataagttgattttgatttttcattccatccttagccacaaatacattgtttaatttattagatgtataaaacttttctattactttaccattagtttcatttctatctgctccacctattctttctgaattaggtaaactttgttttattttatctgatacagcattagtagagcctattatgtatgatttatttatattcttagattctataaaatctttaaagctagatataccagatgcatcagatactggaagtataaccattccattagtagcagctacagaagctatactaactgcatctgcaagacctgtgtacccatttactacagctatttctgatatatcttttaatccttctatttttttagctatactcaaagctgtttggtatctatcactaccaccaactctatcagtagttaaattattagattctaactgtttttgcacatcatttgatacagaactagatagaccaattatataaacttttttaactcctaatctttttaattctttctcagtttgtgaatttagattatttttttctgtcaataatataggagcattttttaatttagcaaatggtgttacagctaatgcatctacaatagattcactatttacaactacagcctcattcgcactactccatccttttttgcttacttcaacagcagtttggtatctgtcctgacctactaaagtattctccactgttgttctacttatttcatttgcatatgctactggtgataagcttaaaactagagctaagcatagcattgatgatattgatttagttaatttcatcttgactccccctaaaattatagtatctaaatgtttcctatttaaaatagtataacataataatttaagtaacatcattattataaaatattatttttctatctaataagcttttattcttacttgacattaatactttactcatcaaatgaattttttatataactaaagtttgtaacaacatttccttagttaatcatttaaagctactttttttaattagattatgtacaaaatataaataacaatttaaataactttttaatatattgtagttgattatataaactttatattataatgtataatgtggagttgattataaaattgatataactcaagtcatattaaaagaggtgtattttatactatggatttattgcatcttaagtattttcaaactgttgctagaatggagcacataacaaaagcatcacacaagttaaatatagcacagccagctttaagcaaaactatatcttccttagaaaaagaacttggagttcagttatttgacagaaaaggaagatatattgttttaaatgagtatggaagattgtttctaaaaagagtagatagcattttagatttagtagaaagttcaaaaaaggagttacaagacacttctttagaaaattcaggagaagtaaagatattatctcctgcagcggctaatgtgttaccatcacttttgagtaatttcagaaaactatatcccaatattacttttaatgtgtcacatactttgccatcatcttataaaaaaagtgattttgatttgtacatatcttcttcatttacaaagctaaactcagaaaatagcataactttaacatgcgaagaaatactattaggagtttcaataaaccatcctttatcattaaaggatgaagtatatctaagcgaagtttcagatgaaaactttatagttataacgaagggtgagaattatagagaggtaattgatatcctgtgcgaatcagctaatttcaaacccaaaatagcatttgagtctgattcaccatatacaatttatgctcttataaaatcacttcaaggagttggatttatatgtggaaaatcatggggattatctcaagaccctgagattaagttgttacatatcaaagatattgaatttaaaagatatttaaatctttcatggtttagcgaaaactatgaatctaaagctgtgttgttgttcaaaaactttcttatcaactattttaaaaatatttaaatcaaagttgataatattaaagaggatatatcaaaatataataaatttaatcttaatattgatacatcctctttttatcattttatattgaacttgtattatagtatagaattatatgttatagctactttttctgtctttcaaatagggtatatcttccctatacttttttatttcatctaaatcaatctctgataatacatatttttccctgtatgtatctaattgagttattacagtacctctaggattgcatattttactctttccaaatagtattaaattagagtcattacttactaaatttacacctactgtatatacagtgttctctaaagctctttgagatacatttaaatcccacatatcttcatcttgtattctccatgcagatggtataaatattatttcagaaccttttaatgtcaattctctggatacttctggaaaacctgcatcataacatatcattacaccaaatctaccaaaatcagcatcatatacctctactttttcccctcctttaaagtatactgcttctaatgaccacagatgatttttacagtattctcccataatcttaccttttctatcaaatataactgctgaattataaacatgtgtagaccctttttctaaggttccatatggagatatcaggtatacattatttcttttagcagcttctgacattgattcctctatgtacttattatgttctcttattaattctaatgttttaactccacctaaagactctaaattatatcctgtagcaaatagttctggtaaacaaattatatctgccccatgttttcctaagtcatctatcatctctactgctttttctatattttttttaacatctccaagtacactgtgttgttgaattatacctattttcaccttacgacccatgtaattgccccctttatttatctttgattccaaaacatttcattaatatataataaataaccatactcactacaattccatttatcggaggtattaagaaatttatttttgaactataatacgacgctgcaaaacctattaaccagcttattactgcaatccaatttattccttctctatgcttataagttcttccttgtataaaataatactcacaccacataattcctgctattgcaggaactgcgattcccaagaaagataaaaatgactgaaatttaaatattataccagtagctgctattattgtacctattagacctgcaactaaagtcaaaacatttctttttacatttggaaaaatagtttttaatgctaatccaccagaataagcatttgatacgtttgttgaccaagatgcaagtattaaaataacaaacgctacccatccaaaacctaaattagccaatacttctgttatatcccaagtaggtgctcccatagacattacaccagctgcaacttgttggaataatgaaataatccctagacctaaaaaactgataatccaaatatcttttactcgtctcgtatatcttaactggtcaggtgatataattgcaccaactataacaagacctactacaatattaagaccttcaaccatactcatagttgtttgaggagtataattataaatagcttcaactccataagtagaaaaagctttaaaaactccccacaccattaatatcataagtggtggtataactaagtaattaaatttagccatagctttaaagccatacagtgcaaaaacaaccataaataatccaagtataactgtaactaatgttaggtttacacttgggaatatcttttgtactgatagtcctgcaacccctgcttgtacaccaaaccatccaaaactagttataccaagtaatagagatataagatactttcctcctatctctccaaatgcccccttagctaatacatacgtatttaacccttctttgtaacctatataaccttgtatcataatgattgcaactaatattaagttccctataattgatgtaataatcatattagaaagagtcattcctaaaattaaagttcctccaaccattagttcagatatagctatgttagaaccaagcatattaaacaatggagctaaccatccaactctttcctcttttggaactggatttaaaactaattcttctctctcttgcaatattatccctccctttctttataaaagaataatttctacttttttctacttttttttcactattaatagaatttttctttatataattgtaattctattctacaaaaaagtataatatctagtttgttatcaatttgatataatttaagttataaatagataaatagtccaaatttattattttaatttaatctattaagtcatatattagacttatttcaaatttgttatatattctttaattaaaatcgtgtactcattacagaagtaatttctaaaacaatcaagtttatgtaaaatttttaaacatagtattttaattatattggctgagaatacaaggataatttatgaaaatatatagagaaaaaatataaaataattctaataaaaaaagtctgaatataaatatactttatatccagactttttacattttagtttcttgcaactacatattattcattatcttttatatcaacttttatacttaattcttctaattgctcatcttccgccaatgtaggagcatttgtcatagggcaaacagcattttgatttttagggaatgcaataacttctcttatattatcagttcctgcaagtaacataacaagtctatcaagaccaaaagctagaccagcatgaggaggagtaccatatttaaatgcttctaataaataaccaaacttttcattagctctttcctctgtgaaaccaagtgctttaaacattcttgattgaatatcagaatttgatattctaacacttcctccacctatttcataaccattcaatacaatatcataagctttcgctcttaaagatgacttatcaccttcttctaacttgtctaaatcttcatccataggtgatgtaaatgggtgatgcattgctgaaaatgtgcctgtttcttcatcttcttcaaaaactgggaactcagttacccatagtaagttatatacatttttatccaatagattaagcctatttgctacttcaagtctaacttgtcctaaagcatcaaatactattgagtttttatcagctacaaataaaagtaaatctcctacttcagcattcatttttgtaagtatagcgttcatttcttcttcattaaagaattttgctattggagaagttactccttcttgtcctactttcatccaagcaagaccttttgctctatatgtcttagcatgttcttctagtgatgatatttgttttctagtaaagtcgtcagctttgccttttacgtttatacctctaacactttttcctggttgtgtagcatcagcaaacactttaaatccacagttacaaacaacatcagatatatctgttaactcatatccaaatctagtatctggtttatctgaaccatatttagacatagcttctgcataagtcatcttaggaagtggaagtgccaattctacatctaaaacttctttaaatatcgcttcaagcaaaccttcaatcatactcataacatcttcttgctcgacaaaagacatttcacagtctatttgtgtaaactctggttgtctatctgctcttaaatcttcatctctaaagcatttaactatttggaaatacctatccataccacttaccatcaataattgtttatataattgtggtgattgtggtaatgcgtaaaattttcctggattaactctacttggtactagataatctcttgctccttctggtgttggagctattaaaaatggtgtttctatttcgcaaaatctattgtttgataagtaatttcttgtaatattcattactttatgtcttaattttaaatttctttgcatagatggttttcttaaatctaagtatctatattttaatcttagtgcttcagaaacatcatcatcatcttttatataaataggcggagtttctgacttgtttaaaagtctaagttcagttgcaaatatttctatatcaccagttggcatattagggtttttagattgtctttcgcatacttttccttttacagctattacaaattcagcccctaatttttcagctttttcaaaagcttctttatctacatctgtatcaaaaactatttgacataatccacttgtatctcttaaatcaacaaatacaagaccacctaaatttctttttttctgtacccatcccataagtacgacttcttcatttatgtttttttctctcaactctccacagtagtgagttctctttaaaccctttaaagtttccaagatactacctccattttatttaattttaatgctatatatttatctaatacacaaaacatcatactttcttattttacagcttttgctttaattcttcaactaatgtacttaattttacagtagtttgctctgatgttttcatattttttaatgtcgcagtgtcatttttaagctcatcatctccaatcactattgtaaattttgaatttattttatctgaatatttaaattgtgctttaacacttctctctatatggtctttatctgcacttatatgattttgtctcaagtcttttaataatttaaagcttcttgtatttgcttcttcacctatagttactataaatatatccgtagattgagggttttctatttcaattccattaccttcaagtgtaagtaaaagtctttcaattcctagtccaaacccaattccacttataccttttggtcctcctaattgttcaacaagaccatcatatcttcctccaccacatacagtactttgagctcctatatcattagatataatttcaaaagcagtttttctatagtaatctaagcctctaactattgttttatcaattacaaagtttatattcatttcctttaagtattcttgaagtttatcaaagtgagatttacaatcatcacacaaatggtctgcaataaatggtatatctttgatattttctttacatgtaggatttttacagtctataaccctcattggatttttttctcttctctcattgcaagtatcacacaatatatcagcttttgagtcaagatactcttttaataaagcattgtactcttttctacaaactggacagccaactgaatttatactcactaccaaatcatttaatccaacttcattaaaaaattgaacagctagtgcgattatttcagcatccattgaaggagtatcacttccaagtgcttctattccaaattggtgaaattgtctttgtctaccagcttgtggtctttcatatctaaaacaaggtgtcacataaaataattttgttggttgagtatctgcatataatttattttctataaatgctcttactacacctgctgtaccttctggctttaaggtaatttctctatcacctttatctttaaaagaatacatttctttttgaactatatctgtagtatctccaacacttctcttgaaaagttctgtatgttcaaatataggtgttaccatttcttcatatccatataaagcacatatttctctaaatttattttctacataacgccatttgtaagcctcttttggagttatgtctttagttcctctaggagctttagtcaacatttttatatacctcttctttcttcctttttatcatttcatctactctttcaatgtattgttcaacattttttacattttctactctttcaattctatcttcatctacataaacaaatttcgatatagcacctgcacctaatgcatagttactttgtttttcttccataatctgtatattataaatgcactcatatccttctttagcataacctatattttctaaatttcccaacatatgtttttgtctgtacatataatatggatttaatcccatatcttttgcatatttcattgataaatctatcatttttaccatttcttcatattgtgttagatgttctttatacctatccatatttatatttaagttggatgctctctttatggctaatgtatgaactgtaaggctttcaggagaaagtttttttatctcctccaatgtgttctttaccatatttaattcttcatctataagacctaaaattatatccatatttatattatcaaatcccattctacgagccatattaaagcaatctactaaatcagatactctatgctctcttccaatctttaccaaggtatcatcattcatagtttgaggatttatactaattctactaacattgtgtttttttaacactcttagtttttgttctgtaatagtgtcaggtctacctgcttctacagtaaattctttaattttacttaaatctaattcattgaacaatgaatttataagcaaatctaattcttcctcatcaagtgtagttggagttccaccaccaatatatagagtttcaacttctttcttagtctccttaataactttggcaaaccccttaatttcttcaatcaatttataaacatattctctttttaaatgtccaaattgttttaatgaatttgaaggaaatgaacaatatacacatctagttggacaaaatggaatacttacataaagagaaattttatttttatctataggatacataaataatcgctctcttttagctatttcaagagctaaatctattttcttatctattataaaataattatcttttagaatggttcttatgctattatcatctagctttttatccattaaattgtggacaattttgactggtctaataccagtcaaaattccccatggtacataagaattaaatacttgtttaagcactacaaacatgctttttttgatattttctttacacagctttttaaagttcctcttactttcactatctagtctattaagaaattcttcaatcgttttgctactatcaaatccatctaaaaattcaagattcatattttctatattctgtattgactcgtactttaaatttccattttcatagtattcagtacttgagaataatacaccattctcataaatcaatctatttattaaatgctttgactctatattattgttagcattagagtctttaaacttaaattcactggtaaacaattttataagttctgctacttcatacttataatcatgtccttttaaaaaaacatacaacatcaacttaactccttctatttaacagtagaagaaccccctcactaatatagttattaaatattttatacttttttaaatactaatataaaattacatgtaaggatttgtcttcttttcaacccctagagtactggttggtccatgtccaggatatactctaacagcatcttcatatttgcataatttcttaagtgatttttccatttggttaaagtctccactatataaatcagttctaccaatacttccagcaaacaaagtatctcctgtgaacatttcatcttcaactcttatacacatacatccttgagtatgtcctggagtatgcaagaaagtcatttttaattcaccaagttcaagcttgtctttatcactcacatagatatctgcatcaaactcttgcgctccacatctcattgtataacttagatttttatttttatcatttaataattctttttcatcaacatgtgcaactactttagcaccagttttttctttaatatccttaacatatcctatatggtctccatgcccatgagtaaggataatatattcaatatttaattcattttcttttacaaaacttaatgtctctactaaacttccacctgggtctataactgcacattttttagtcttttcatcacctaatacataagtatttactccaaaataactatctacaaatttttttataatcattaaagttttcccccttaaaaagatttacttgagtctaatagtattgttactggaccatcattagttaactctaccatcatatgagctgcaaattgacctgtaccaactgtcacacctttatcttttgctttttttacaaattcttcataaaggttatttgcaagttctggtctagatgcattactaaatccaggtcttcttccttttctgcaatctccatataaagtaaattgagatactactaaaagctctccacctatatccattagagataaattcatcttgtcattttcatcttcaaaaattctcagattcaatattttatcaatcatataatctacatcacttgatttatcatcatgagtcactcctaacaatactagtaaccccttatttatttgacctatagtgttttcatctactgtaactttagatgaagatactctttgcactactgctctcatagtttcctccctattattttaactctaatttgtcattctataaatactttctacaccaggaattgcttttaattttttcattagaatttttaattcctctgtgtcattaacctctacaagtaagtttatacttacaatactatccttaccttttcttgcatttattccgtttaaactaagtttatccattgcaacaatatgagttatttcattaacaattcctcttctgtcaatagcttttatttgaatttccgcttcaaacttaccttttcctgctgaactccatgaaacctccaccaatctattttggaagaaatcaccattattgtttgcatttgggcaatcagctctgtgtatggctactcccctacccttagtaatatatcctacaatttcatctcctggaagaggattacaacacttagcaaatcttactaagatattgtcaagcccttttactataattccttgtgatgcgtttttctttctctttttactgtattctgtttcacttatattgtgtttatttaaatcttcttcttgtatctgttgttcctttttagcttttttaacctcttttaaatataggtcttttaccttagataccacttgagatgacattataccgccataacctacagtggcaattaagtcctcaacacttggctgattaaatttcttagcaactaatgccatatatttttcaacaagagggtctttttgtggtatatcatgcttcttaaattctctttctaatattgtatttccacggtcaacattttcttctcttctttccttcttgaaaaattgtctaattctactttttgcatttggggtcttcactatattaagccaatccctacttggtccattagaattagatgatgtaagtacctcgacaatattaccattttgaagcttataatcaataggaactattcttccatcaattttagctcctacacatttattacctacatttgtatgaactctataggcaaaatctataggtgttgattctgctggtaattcaattacgtctccttttggcgtaaatacataaacttgactattaaatacatcttctttaagtgcatccataaactcttgtgggtcttttaaatctttttcccactccatcatctgtctcaaccattgaagtttttcttcaacctttgactctttgctagagataccttctttatatttccaatgggctgctataccattttcagctatattatgcatctcatgagttcttatttgtatctctaaaggttctccatcaggacctacaacagtggtgtgtaatgattgatacatattgggttttggcattgctatataatctttaaatcttcctggaataggtctccataatgtatgaactataccaagtactgcatagcaatcctttacattatcaaccaatatccttactgctgttaaatcaaaaatctcttcaaaagtcttatgttttttttgcatctttctatatatactgtaaaaatgctttggtctaccatatacatcacatggtatacttaaatctttaaacttatctttaagaagttcaacaattccttgaatataatcctctctttgacttctcttcattgatactctactaactaaatcataatacccttctgggtccataaatcttaatgctctgtcttctagttcccactttatcttggaaattcctaatctatgagctataccaccataaatttcaagtgtctcttttgctttatactttgctttttctggaggcatgtattttaatgttctcatgttgtgcaatctatcagcaagttttataagtataacccttatatccttcgccattgccaaaaacatttttcttaaattttcagattgagtttcttctttcgaacgatattttatttgaccaagtttagttactccatcaaccaaatccgctacttctttgccaaattctttttttatgtcttcataggtatattctgtatcttctacaacatcatgaagtaaacctgctgttatagtttcaatatctaattccatctctattaaaatatttgcaactgctaatggatgaataaagtatggttccccagattttctatattgtccttcatgcgctttttttgcaagattataggctttttcaaccatttcaaaatttgcattaggtgcataaacttttattttttcaattatttcttgtaattctttatcatgcatataaccacctattttgtataaaattttaatatatatgaaaatagttggtgttataccaactattataaaagtactagtattttataagagaattaacatcatagttagacaacttttctctcccatttaagaattttagctcaatcaaaaattgcatagaaactacttctccacctaatttttctacaagcttggcagcggcttccatagtcccaccagtagccaataaatcatctactattgctactttttgaccctttttaattgcatccttatgtatctctaaagtatctgtaccatactctaatccatactcataactctcaacttcacctggtaactttccaggttttctaattggaacaaatcctactcctaaagcatatgctacaggtgtacccatcaaaaatcctcttgcttctggccctattactaaatctacatctttatctttcaattcttcaactatagaatccactgcatatttaaatgcatctccatctttaaatagagttgtcacatctttaaaatctatgcctggttttgggaaatcatcaatattccttataaagttttttaaatccatgggaaacgcctcctaataactgctattgtattgtttttctaaattttttagattattgagtattaaactctcatttaagtctaattttttctgtggttttggcaatattcttatgagtacagaatttttttcataatttaaattaaagtcaagtaaatttaattctctaaatacatttaatatcgtaaaaaactttaatggaattacattaaaagtttcccttatatttaccatatccaaatcaatttctttttttataagtgcttgtttataaattgttataaattcatctcttgatggaactatattactaactacattctttaaatataataggtctgttttattataatattttataatttcactttcttctcttttattctcatatatatacgaatattcgcctttattgtataaataatcataaagaataatattattatatctttttaagtctattttatcaatattaggagaaaatataagctctaatttatcagtatttttgctaacatcttcaataatattgtaatttatgttaaaatccaaatctataagtgatatatctgacattgctctataaaatccatttatagaattagatattattagtgtatctttttcaaaataatcaaatatatttatatctgtatttccatcaaataattcaaaatcagacacagatatattatacaggctttgagtatcttttggtattatttttgacattaatttcaatgaaagtttgtcattacttgcacttttaggtcgagccaatcgtatatctttaagtaaaaattgtactttcctatttcccatatagttattttcatctaattggaatagtacatctactttgtctcctactttatacattgattttaaatgactcatattaaatcctatacattcatagcttttctctttttctatacttaatttcagatgttgttgattcttacctataactttcaaatcttttaaaatataatttctaactataaatctaggattaggattatttaatccaaagggttctaacttatgtaattcttctacaagatttaaatttattacattttcttgtaattcaaactcgacatttacattctctatcatatcatcttcagttaaattataatctgcaaatttatttatttcatttgctaaaatttctacattgtctgaatccaaggataaccctgctgcttgttcatgaccaccaaacttagtcatcaagtctttgcactttatgagagcttcaaatatattaaatccttttattgacctcgctgaaccagtagcctccccattttctatacctagaagaattgttggtttgtagtatttttcagttaactttgatgctacaattcctattattccatgttgccaaccctctttggctaaaaccaacactttgtcatcattgtatctgctattagactttagcatttcttcagcttcatgatacatcttagcttctatcatctgtctttcattatttttttcttccaatatactagctatttctactgcctcttcttgtgactgagtagtaaatagctctactcctaagtaagaatatcccaatcgacctgaagcatttatcctaggacctattgcaaaacctatatgagaagaacctatcttatcactttctacaccacaaacttttataagctcccttaatccaatatttttgccttctttcattgattttaaaccattttttacaattattctattttcatctataagtggaacaatatcacaaatagttgctagtgttactatttccaaataattatacatactagttttaaattcttcttttggagtcaaggcttgaatcattttaaatgctacaccacatccacatagtgaatcaaatggataattacaatcttcttgttttggatttattactgcaaaggctgatggaatttcactttgacattcatgatggtctgtaattataacatctatgcccaaatcattcgctgtattgacctcagacactgatgtaattccacagtcaacacttataatcaagtcacatcccctagagcttataagcttaatagcatcctcatttataccatacccttcttctaatctattaggaatatagtaatcaacattgtaacctatactcttaaaatataaacacaagatggatgtagatgatacaccatcaacatcataatctccgtaaatccaaattttttcgttcttctcaactgctaactttattctatcaacagctttttgcatatctttcattaaaaaagggtctcttaaataatctaaagatggattcataaatatttctgaatctttttcagtacatatccctctattttttaaaatttggcagatttccggggaaatattaagttttttgctaaattcactttcctctatcttacctttatacttcaatatccattttttcaaatttaattccccctaatcttttttgtattttgacctaatacttcttataactaagcaaaggcctattataaaggatataaagaaacccgctattgcagtaaattttatccatatattattttctatatttggagatgcaattataagagaagaacctactataatagatgccaacactaaactcaaagatatttgagatgttagctctattatacaattttctaacctcgtcattttaacatcttcaatttgcatttttatattatttctttctatattttttaaaattgcttttaattgctttggaatagtttttatgtccagtaatatttcttctacattttgtcttgaacttaaaacaacatttttagggttaaatttactcttataatgatgtttcataaactcttttcccatagaaccaaaagaaaaatctgtgtttaaagttctacttgttccttctaatgttataactgtctttgcaagagttacaaattgtgcaggcatgactattttatactgtctaaaaaacctaaatagttcatttaatatatctgttacatttattttttctatagaaatatcatagtaataatgtattagataaagtaaatcctgtctaagtcccttaatatcagcctctccatttaatgcatccatttctatcaatagatatattatcttgtcaacattcttttctacacctgctaatgcaatttcatttaattggtttaaagttttattatcaataattccaatcattccaaaatctatatatgctatcttatttttagcaactacaaatatattacctggatgtgggtctgcatgaaaaaatccatgagataatacctgtgtaaaaaatgacctaactcctatttcaacaatagtttttgtgttataacctagtctccttattttttctacatcacttaactttgtaccattaactttctccattactaaaattttcttagtattatattctgagtatactttaggtatatatacttcatcactatttttaaatatcctagagaatttagttgcatttatggcttcaaatgtataatcaagttccctcattaattgagtttgaaattcttcaatcatctgtactaaatctaaattaaaatccttttttaaatcttttaaagtatttgcaatagttctaagaatctctaaatcagattttattattttctctatatttggtctttgaatttttacgattacttcttctcccgttttaagtacaccttcataaacttgaccaattgaagctgctgctattggttcttctttaaattctaagaatatttcttctatacttaaacccacttcttctttaaatatatcaatagctatatttgaatcaaatttctctacatcatctctgagttttgatatttcatcaattatatcctggtctaacaagtcttttcttgtactcaatatctgtcctatttttatatatgtaggtcctagttcttctaaaactcttttcattctctcaccagttgtcatattttttatttcttctggtgggtcaaatagtggtattttataggcaattccttctatatttagtctttctacaataaaactaaaaccatactttattaaaacatatccaatttctctatatcgctttaaatttctataacttattctcaaatcttttcactcctaagataggtatacccaaaaacttacaccttaatttatcgtatatgacattatttcaccaattgatattctaatatcctatatcctctttaatatttaattttatcacatatactaccaattttattaaaattatttaactcagttaatttttatttttgacattttatatctggtttaatcaaatactttttgaaaactaaaatatcaacaaaatctaataaaataaattagtggttgcctcaaaacagatttaaatatgttttgaaacaaccactctttaaactaatatttttgattttgtgctgcctctaaataccattcataagattcatcaatatattttttatcttcttctgtaagctctctaacaaccttaccaggagaacccattatcaaaacacctggtggaaacttcttattagatgtaattagtgtacctgctcctatcagagtatattctcctatttcagcattatccaatattattgaacccataccaattaacacattatcactaattttacaaccatgaactatagacctatgcccaactgttacattgttaccaattatagtttctgtatctccatgcactatagaacaatcttgtatattagtgttttctccaatagttattggtccttcatcacccctaactactgcattgtaccatatacttgaatctttgcctattttaacatttccaattacatctgctgattttgccacaaatacactttcgtcaattaaaggtttatcttctaaataatctctaatcatatataaacaactcctttaaaatataaatttagttggttgctccttctaacattaacttagcttgtatcattatagagcactctgtacgttttctttgcatttcacatcctaattcatatggttttgatatgtcattattaaagtttatcgcatttgcatgacatccacctgaacagtaaaacttattccaacattgtttacactcttctttagtatatacatgagcttctctaaacatattttttaaattttctggaagtactatttcttcatcaaatatatttgccattttaaattcttcatttccaacaaattgatgacatggatagatatctccatttggagttacagaaagatactcatttccagctccacatccagttattctctttattacacatggaccttgatttaggtctatcataaaatggaaaaatttaaatccatctccttgtaattgtctatctgcatactctacagcaaatttttcgtactcttcaaatatcttaggtaaatcttcttctctaagtgcatatggattactctcatctccaacgactggctctacagaggttaatttaaatcctaaatctgcaaaatgcataacatcttttgaaaaatctaaattatctcttgtaaaagtacctcttatataataatacttatcttttgctcttttttccacaagtttcttaaatcgtggtaatgtaatatcataacttcctttatcatttaaagttggtctcatattatcattaacttcttttcttccatctaaacttaaaactacattatgcatattttcatttatataatctataatctcatcatttaacagtacaccatttgtagttattgtaaatcttatatttttattataatctttttctacacttcttccatagtcaaccagttgttttacaacttcaaagttcatcaaaggctctccaccaaagaaatctatctctaggttctttctacttcctgaattagcaatcaaatagtcaattgctgccttaccaacttcaaaactcataagttctttttctcctccaaaatcaccttgagctgcaaaacagtatttacattttaagttacaatcatgagctacatttaaacataaagcttttactacaggctctctatgtacaaagcttggatgatattgatatgtatcttctgtgtataaaagaccttctttttccaaatttaatatttcttcatatgcttcatttattttttcttcttgatattttgattttaatatctctaatatttcttctttacttttttctttataaaaatctaacaaatcgtatgcaacatcatctaacacatgaacagctccaccattcacatctaaaacgatattatatccattcatagaaaatttatgtatcatactcataccctacctcctaaattactatctatactaaagttttttattattttaattaaactttacccttcattatatcataagtttacataaaatacatacaatacaaaaatgacttactctccgtaagtcatttcattaaatacactatatccccctaaattggcgcactaatatattaccaaataggtattaggctcctataaaataaataaaataaattttgtatctgattttatattgttttaatcttattaaaatataataatttcttttttcctgataattttgtataaataagtgcttgtatttaatttgtcttctttagattgctgatttctttgggtactttaggctgatgaataatccaaggacaggtactattagctgacaaaatagcagtgctaagtgccaatgagctagcaaacttcataaatcttacaataaactttttcataacttaactctccctcatacatattttacttatactttagcttttaacttacctaatactaacatcacaaaaatccaaaacatggcaaatgcgctatatgtgaaataatctacaaatatactcaaagaaagacttaaaattgttatcaataacactactgtagatataaatatagcagttttcttataaacaaacttttccctatcacttatagggttactcctatgttctattggacacagaacacaaattccaacccaactaacacttgcaataatcataataatatttttaaataagtctatatttatattttctataattaagattgtagataaaattataaaaataaaggttaataagcatctaaaataattgtctgcatgataccctcctgaaaattgtcttattggacaataacacattaaaaaaaataatacatatgtaaatttaccaaataaaaaacctataaacagcatggtggttatattaactatgaaagctattaatatttcaaatccataagaatagactttagattcattattatctatcatattattacaaattaaaacagatgtcattttttcagcatatcttttaaacatttttacctccaaaaaaattttacatatatagagtacattcttttttgagaaaattcaatatactttacaaaactagttgttaaaaatgcaaaactggtcaaaaaaagacctatataattttcttattattatttatataacaaaacaattataataaaacaattttatcaagctttatatgcataaaaagcctatgtcaaaatagaaataaaccttttccccattgttaaaaggctaaaaatatattttatttcatataaaaagagtacctcacaaactaaaaagttcattttgagatacccattttatttattacaaaatatcaaattttatttatttgcatatattttctatatattttagccttttaactttgtttttgttttacatactgtagtgcttttctattctgttttactgcttcaagacaaactttttctgtttgattatcaacaaattctaaagctctataattttgctttactgcttctaaacatattttttctgtttgattatttacatatttcaacattctataatcttgttttactgcttttagacaaacttcttctgtttgttctttcacatatttaagcgcttcataactttgattaactgcttctaaacaaatctcttctgtttgttcctttacataagctaaagcattatagttttctcttactgcctctaaacatattaattctgtctgattttctacatatttaagaatttttccattttgctttactgcttctacaaatattctttctgttggtatctttacataacttaatatttcttttatttcaagttcttcaaatgaacctcttactgcttctatacatatattttcagtctgtttttttacatattgcaatacttttccattttgtctaactgactccaagcaaatttcttctgtttgctcttttacgtactgtaatgctcttccatcaattcttactgcttccaaacaaatctcttctgtttgcttatttacatactgtagagccatataacttctttttactgcttccatacatattttttctgtctgttcatttacataatacaatgcaaagtcattctgttttactgcttctatacatatttcttctgtttgctcttttacacaagatagtgcactgtagttttcttttacagcttctaaacatatactattactttgttcctttacataagctaaagattttccatctttttttacagcttctaaacatatggctggagtttgctcttttattccttttaatatctctgcaacatcatttttagatgccctttctataaatgctagacatacatcttctgtttgatcttccacaaatttaaatacttccatgacatcataagttgatgcattttttatagcctcaattagtacattttctgtcttattatttatgtagtacaaagctctgtagttctgttttactgcttctatacaaatatcctcattttgatttgttatatacttaagagctttatatgtctgttttactgcttccatacatactttataagtcttgtcctttacaaactcaattatagtaccatcctgctttactgctagcagacacatctcttctgtttggttttctatgtcttttaactctctgtaatcatattttactctgcttaaatcatttaaatgtactttgttatcttcctttaaatcttcttcattattttctatatcatactcaaattcttcatcatctaaatagtcatttttttctggtaaaaatatagatttaattttattctttatatccataaaattatcctcctttaatatgattctatcattaaagtaaatcgtttttaagcacttatttaattaattttatattaagtttatttaaaagtctattcattgtcgatagattatattttatattaataattttatcttatatatgtggggtaataaagttaatagtggacattttccatcccattagtatacactatttatatttattactcatttatagtgatttttttcaaattttttcttatttactatatcatatttatccaatttatgatattatttaaatataatataagttttataaagtatattaaatatattataagatggaggtcgagtaattttgaaaggaaacatagtacaatataattttgcagatatagaggaagaagtatattcgttggattatgctatagcatggaatacagatgaggaaaacgtaaacataataccatttacaaataaattctgtaaagaatctatagaatctttttgcctaggtaaaattaataactttgttgaaatattaaatgaaggttttgttgaaaatcatcattatgtacatttagataaaatgattagtgttcctaagaaaaaggttaatttagtatatcaacaagacacacatggttatcttctaagagatgataatgacaaccttattcctgcaaaaataacttcagagcaatctaaatctatatcaagtaagatggagttattctgtgctggtgaagaaaaatgtttaattaatatattactaaaggctgacccatcatatattttagatgtagatagtataaaagacaaaaacattctaaatctaggttatgagtctattgacagatataaagaatacaattttgatgatgataagattttaatattttttataaataaaaaacgttattcagtgattatgaaaaaaacaaacaactctgataacgatttagtttccagaaacaatgctattaaagaattatttactaataaagcaggaaatcttaactaatattataattttaaattatattattaattaaattaataatagtatacaaagaggctgtctcaaaatagagataagcttctttttcattgttgaaataataaaatatatttaattctatataaaagagagtgcctcataaactaaaaagttcattttgagacaccctcctatttataataaacaaataaatccttaaacctatcgagtgattataatttttagattgggttatcttgcatttttaaatttaaggtaactttctactctaaactttaatctctaatcaatatcatcaactgtaacaacttacaattaaatctttaataatcaaactttagactatctatattaaaactcaaattagatttaggatttatttggatatcacatttattttattaactagtaatcaattatttttacttataaacttattcttccctaattctattattaaatacttttaattatttttcaataccatatttttttaatttttactattaaatcacaaaatattatcttactccatcacaactacttttgatatcatttgagaatgaatcttcattttaatagtacttttattgataataacatccatatatactatagtcacaatgcagttttgctttttcacaaaatgactattacaaagattaagtaattcttagtaatcttttataaaaaagagatgcttcaaatttttattttgaaacatctcctttttaattcgtaaaatataattttgttatttagaaaaatgaattttagtaactatataacattaattatatattaaaagtcttttctatatagctttttatttcttcagcagtacccatattaagtacatcatcagctaattttttcatatctgactctttaactgaagttattaactttctagcaggaagtattgatattggagacatagagaactcgtctaatcccatacctaaaagtattggtatcattttttggtctccggcagattctccacacatacctgcccattttccttctttatgtgcattgtctataacagtctttataagtcttaaaacagctggattaaattgattgtaaagataacttatcttttgattcattctatcaactgcacaagtgtattgaattaaatcattagttcctatagagaagaaatctacgtgtttagccaatacatcagatattacagcagcagatggaacttctatcatcataccaatttctacatctttagcataagccacaccttcagaatcaagttctgctaaaacttcttttacaacttctttagcttgtaacaattcttctaaagatgaaatcattgggaacatgattcttaatcttccatgaatactagctctatataaagctctcaattgagtcttaaatatatcttttctatctaggcaaagtcttattgctctgtaacctaagaatggattcatttcaggttccatacttaaataacttaattctttatctccacctatatccaatgttcttataactataggctttccatccattccttctaatacagctttgtatgcttcatattgtatttcttctgttgggaaagaatctctatccatgtataaaaattctgttctataaagaccaacaccttcagcatcattctttattagaccttctatatcgttaggtgttcctatgttaccagctaattccacatgttttccatctaaagttacagatggttttccttttaatagctgtaatgcttttctctcatcttcatacttagcttttaattcagtatatttatttatagtctcttcatcaggattcacaattacttcacctgtgtctccattgaaaactacaaaatctccatccttaacttttgaagttatatcatttaatccaacgattgcagctatttctaaagttctagacatgatagcagtatgagaagttcttccacctatatcagttaaaaatcctaaaaccatttttttattcatagttgctgtgtctgatggagttaaatcatgtgctattaatacaacttcttcgcttaaagcagataaatcaacaactttaattcctaatatatgtctaagtattctatttgtaacatcttttatatctgccgctctttctttcatgtactcattgtccatagactcaaacatgctaacaaacatctcttttatttcatttaaagcatactctgcatttacactttcagttttaattttatctattgcagaaccaattaactctgggtcttctaaaactaataaatgtgcttcaaatatttctgcttcctctgctcctaattcttcagaagccttttccttaacttttactaattcttctttagaaactgcaactgcatcttctaatttagcaatttcagcttcaacattatctatagattttttttcaattactaattcactatgttcaactactaacgctttccctaaagcaacaccaggagaagcacctattcctttgtaagccataaccctacctcctaaaaaatatcatctagcacataaactctataaatttatataaataatttacatttttatagttttatttacttataattttttattaaattttataaactgtttgttactgtatttttactctgaatttatgattaaaaatatcttatttcattttctaaaatatttatatttttatacccaattaacaatagtcttaatcttctgattaaataaacatgaaagtaacaaagaaattaaatatctacaaatgttggtctgtatatgtttaatacttctctgttactttactttaagtaatattagattctaaatatcaaattttaaaaaattattatatctattctccaaatccactttcaactaattcaaccattgcagctaaagctacttcttcatcttctccatttacaactaactttaattcttctccttgagctaaacctaaactcattattcccattattgattttgcatttacagttttgtcttttgctacaacctctactgttgatttaaattcagctgccttcttaacaaacattcctgctggtctagcatgtaatccacttgcatttttgatactaactactttttccattttttaaatcctcctataaactttacattttatattttttaaaattgttttcctgttttttactttaatggtactaagtggtacttttttgtcctatggtcattttttgttcccactagtgctacaaaaatattatactactaatatacacttttttcgagtataattacaaatttttttttgttttttatttaactttgattttttatgtcttttataatacaatttgtcaataattttgtgtttttgttctttttaatactaattttaggtctaacttcaaaattagaagctaaatttctattagaatcaatatttgtatttacaacatctataaccttgttaaaatcatataattttatcctgtttatattattttcttcaagtttcttttcatatatacagtaaaacaaatctttatatgaaaagtcctttggcaatccaagcacctcaccaagctttggtattacactttccataacagttctaagtgaagcatctctttttatattcaataaattacagatatattgtattgtttcattgctcatacttctaaatttatcaaaacaatattcttcattatatttatactctacatcaaaataatacttaattccagtgcatctttcatatgctttcatagtatctaagtaacctagtcggatgtttttttctacattatctctatctttattaagagaacctcctagatattctgatggtattatagtttttatatttatattttgatgtcgatttagattcattttcccaataaaatcatcaatcaacctaattacaacaacatcttcataacctttgtcttccaagagtcctattggcatgttatcacaaaacattccatcaagatacaacttatcatccatcatgttcgtttgaaaaataggcaaactggaactagcaattaaataatcaatcaatcttcctttaggtatatcttcgatatacaatggatatggattaatttttttatcccaccagaccgtaacaagtccaaagtctttttttgatttccttattatgtcttcatttaatgttgtctccattagttgtcttaatgggcttatatctataccttcattttttctagctttatttataagctcaaacactgcattgagatttttagtagtgaaatctacatttttaaacctctcataggtttctctatcaatattcataaaatgagtatagtcataatttaaccaaatatcttccattacttcaatatcattttgaattatatatgctccatttaaagcaccaattgatgtgccagttactccttgaaactctataccaagctctcttaaagctttatatgcacctatttggtaggctccttttgttcctccaccttctaaaactaatcctttcatattatcacctactatatcaaaaacgtttctgatttttattcttaagcaaatattaattcaaaaaactatttttagttattggagaaaaataaaattgcacaaattcattcttattttatcaaaaaaatattgaaaagtatatatttttaatattttttatatggctaactttttatttctaaatttaaataaacaattaaaggattataattttttaatacttacaactgcttatatacctaaagaatccattatcaagttatccatttttatctgcaatttttctacttttcctttatctatagacttatttaataaaattgatattatttgctttgataaattctctatctcttcataattattatccctaaaaatccttatcttcataaccttattaggatagtaatcatatatatttttactcatttttttagcagttattttaaagtatttatcataaacactggaatttaaaattccaactagatattcatatgaaaatttatctaaatactcttcttttataaaaaaagaatatacatctgcacttgaaaaattgttatcataatctatagcaaatctattttcatttgatttataaggatacattatcttttttctttcaaagaaaagcttttctctaccccattgaagttcataccatttccttattccacttttacattctcttctgttttctaattttgttttatatagccctataatttcatctagtatctttttatttgtattctcattatctatatcatttgagtatattagcctatattcacttttatctactatatatttatttatattcttactttttatccaacattttaaaaatttatcatctacaaggttcaactttacatcatctttacttaaaataaacgctttatcacaccctgtaattattccttgaaaacttattgctatatcttccaagctatatttacatttttcttgtatcttattataaaaagtttcatcatctttatttacaagtatccattcgtcagatagcaatctctgatttatattaaaatgttcaaatttgctactctttagaagttcttccaatgtttcaaatttatttatacatatatcctcatttttgattttaaatacatctatatatgtctcttttgtttttttcttatcaaaagttagaatacaactagatacccctatgtttttaaatatatttgcacctaaaaaatccactatttcttgaacattgacatttgatttaatatattctcttaaatctttacctgatagactttctaagaaatatcttggagttataacactgccaacccctccttgctttaaaatatctataatttttttataaaaacaaaaatataagtcagctttatccttataaacttcactatatttttctaggagaaattttttatatttcttttcaagttttttatgaccaatatagggtggattacccactatgtaatcaaacttatatcgccatttctttttaagactatcacaacaaaatagattaatctttatatcagattcatctaaatcatttactacctttttatttgttaagctatcttttaatatacttatagctttttcatcaatatcagcaccatatatacaatagtttaatatatgacggtgtatgttatcaacagtccaataattttcatcatacttctttttcaattcatatatattttcctcaaataagtcatataaaatatcatatacttctaaaagaaaatttccacacccacaggaaatatcaagtattcgtggatatggatttttaattatatcgtgattttttaaagttttttttacaatataatctacaattattttaggagtataatatattccacttgcttttttagtatctacatctaagctattctcatactctttagacagtagaaaattatcttgagatatatcatccataaccgaaaacctccaattattatcatagctgaaaattttttattctagtatttgtcttatagattttctcgataaaagtttataaatttctttttctatttctagcaattcacgatttactttacaaccttttaagcaattactgcaattagatacatatctcgtacatttatttatatatatttttccatcaattacttctacaatagttcttagacttattgtatccaatgacacatttaacatgtatgtcttgccatcttctttgttaaaagtaagaatattgtttgcacaaagctttctaagcagtctgtatagtgttagtattggtatatcttcactttttaatatcattttagcatctattggtttatcttctccattattaaatatagctcttatgattcttattgaataatctacatcttctgaaatcatccttactcctcctcaactgtcatgcatttatctaaaagagtatctttcagatttatataacttccgtcagtaagaagttttttataattcatctcatccaaaggtttaaaaaatacataaccttgtatgaaattacatcccagttcacttaagactttgacctgatgcatatcctctaccccttcacatataacagttacgtttaaatcatgtgaaaggttaataattgctttcaccataaactttgtttttgtatttgtaactatatccaatataagtgacctatcaatttttataatatctagtggtatccccttaagattgataaaatttgaattacctactccaaaatcatctaatgatatattcatacctaaagatttaatctcataaagcctttcacttataaattttacatctcttagcgctgtcgtttctgtaatttctaattctataagttcttttggaatattatatgtattaaacatcagtttaaaaaaatcaactaaatcatttttatatagttctactctagaaagatttattgagactggtaagacatttataccttctgaaatccacttgttaatggtaataaaaacttcttgaattagccatctaccaatattgtttatcagaccatttttttcagctataggtataaacttatttggtccaaccatgcctaatgatgggtgcaaccatcttatcaatgcctctgaacctataatgttacctgtacttgaatcaactttaggttgatagtgaattacaaactctttatttttaatagccaagaataaatctctctctattttcataattgattgtatttcttcttccatagcattatcaaattctacatactctatgtgctttagtccttttgatttaagccttgccatatcagcattatctatagctttttttatatcaatttcattattgttaaatttataaattccaatagaagcctcaatatttatatccattttaaaactgtcaatctgacttaatatcataattttattcttgataagatttactaaataaggaatcttctgttccctattttcaagctttattattaatacaaaaacatcactttttaactttccataaatagcttcttttccaaaataattttttaagttacttaaaatattatttaacacttcatcccctagctcataaccatatatatcatttataagtttgagtctacataaatcaaaacaagccattacacagttttctttttcattactgataatataattttgaacatgttttaggaagttctcatctttagtaatatttataaacttatctgaattatttatcaatcctaaattaattttatcctcatacaacttaattttaagatatgaaataaatacatttatactaaacaaagttaataaaattaaaattaaaactttaatatctacctcaatatgtcttgtaagtaaaactattcctaaaattccaattataataaaaattattttatttaaactgtaaatttttgtcatgctatttttattcatataaattcccctattttttaaattatcttacagttaaactttatatatactaattataaagcacaattgatagcaaatcaatgcaagttaaaatcacatataaataactacattacattatactaaatttatttttttaaattttataactataaattttttgcaaaaaaaactatgaaattagatatagataaaataatttctaatttcatagtttctaaattcaaacaatgtttccaacattacgaaataaagttaatacaatttacacagttaaacttttaaatttatcctcacattaaagtaaagttaacttacttattccctttagaatctaggtatgaaagtacaccttgaacaattccttccgcaagttggtcttgatatttttcatttattattttttgttcctctgaaggtgttgttaaaaaaccacactctattaatatagcaggcatatttgattctctaagtacttcaaagttattttcaactattcccctatctctaactttaacataggatactatagtactttgtactgtctgtgcaagttcttttgaaccatctgtagctttattcctataccaagtttctatacctgttgctgtattaccatttttctctgcatttaaatgaatagaaacaagcacatcagcagaactattatttgctaagatagctctatcctttaatgatatatatgtatcatcagttctggatactactacttgaatatccttttgtttagataatttatttgctaatttttttgcaatttgtagatttaggtctttttcatatctattactggtcttgctttcagttcctttatcattgcctccatgacctgggtctataaatacagtatattttttctttttattttcctcttcattaccaaggtcaaattgttctgagttaactttttgttgttgactagttttattacttttatccatactttttaccaaagctactacaccttgagtagccttaaatgcaataaataaaaataaaactgtaaagcaaatcaacactgctaactttttcttatttaattttcgcttttttctattcagatgactggtctttttagatttgtttcttgaattattgttattattgccttttgacatttcttcacccttcttggtataaatttttacacttttacatattattagtgttattttaccatcaagaagtttttttttcaataatttaaaacactctacaaccttaaatcagaatatttttaattatccacctaaagtgacatcttgtgtatcataccaactaaatgcgtcctttatatcgtcactcttaaaatctggccaataattatctataacataaaaatctgcataaattgattgtacaggaaggaaaccacttaatctccttcttccaccccatctgattattaaatctagtctggatacatcaaatgactgtatgtaatcctgtatattatttttatttacattttctactcctgatatattatttaagtcccaataccacccataatttaccagaagatttgcttttatttgaccttctttggctttaattctattagtatatggtaataattcttctggaaacattggagattttgtatttcctacaactaataaagcagcaccttcatctattaatatatttgcagcatcaatacatgcttttgtaaaagcttttgtctgcactgatggacgtcttgtattatcagttgtaaatccataaaaagtcacctcttcacagcctaaatctctacataatctataagactctaatccagggtctattccactttcatatcctttatcttttgtcataccattttgacttgcccaccttctatttccatccggtataattcctacatgttttggtattctcatttctaatcacctctcaataggtattattatcaaaatattacattattaatcaaaactgtaacattaaatacatttatttttatataattatgtagtaaactaatttaagacagagtttaaaaaacttggaggtttatcatgaaaaaaattttaatattgtttttttcgataatcttatcattaggaatggttagttgttcttcaagtggtgattacaaaaacgtttctacatcaaaaataaaaaaagcattaaaatcttctgatttacttataaaagaatcaaaaatctttgatgcaaaggactttaactattttaatgatgtagaggaagacataattcaaggttttgtaattaattcttctgaaaaattatctctagaagatattatcgttataaaaactgacgaggtagataaaatatataaaactctagaaaattataaaaaagatatgatacaagcaccttttggagaaggacatggagaaaaaatcaattctgaaatagcaaataatactataattgagaaagcaggtagatatgtttatttaatttctgctgaaaatgcaactcaaatagaaaacaaaatactgaatatcataaaaaaataaatatctattattgatgtttattaaatatcaatgtaattttcgcataaataaacttatttatcaaaattacattgatatttttttgatttcttcaaaataatctttttcatctatacatatgactatccaatttttatgacctcttttatcttatctacaacgccattttcagtatttctttttgctctaaatctagcaatttgtttcaaatgttcatttgcattttccatggcataactatgataggcacttttcatcatttccacatcatttaactggtcaccaaataccatagtttcttcatattttatatctaacattttttgtactttttttatggcactccctttatttgcaccttttgcagttaaatcaagccactccactccagaaatacatacttgagctctatcagaaaacttttcaaagtagatattattattatgttctgcacctttgaagtcaaatacagctatcttcaatatatcgccttctactttcgtcaaatcgtctacaattttaaactttgcataataagtactaacctcttgtataaacgcttcatctttgctttctatataagcgtattttttcccactcattacaatttttttcccttttatacttcttgttgtctctatgatttcatttactaattctttatttaaaggatttgataatatttcttttcctttatatactactagtgttccattttctgatataaacatcatatcatcttttatatcttcaaatttttttataagattttgatactgcctgccactagcagcagaaaacattatccctctctctcttaattttttaaatactttataaaactctggatttatttcgctcttttcatctaacaaagttccatctaaatctgttgctattaattttatcatacatttcctcccccaaattattaatttataattattttttattaatttttatcggtttgaattttcaattcttattatacactaaaaattttaaattacaatttacacctttcataagatgctataactacattcaggaaaatatttttttcaatatacacatcagtttataaaaatttaagtcttcatacaattatattccaataaaatcaataataactacacactttcttctataaaatactataaaaataattatattatgacaaacttatgctaatttattgtgttttttattgcttatgtaacaaatttttaatataattaactatgtgtaattaaaaaatttagaaagtaggggatattattgtcaggactcaaaaagttcgttatatttctagcccttttagttatagcatttcctgttagtatatatggatatgtttttactaaattaaaaactatacaagatgatagtataaatacagaggcgcttagtagtaatgactataaaaacgaagaaaatatcacaaacatattattgttaggtacagatgcaagaccaggagaagaagtttctcgttctgatgccatgatgatacttactattgataataaaaataaaagtcttaagctaacttcattaaatagagatacttatgttgatataccaggacgtggagaacaaaaattaacacatgcctacgtatatggacaagctaacttattaatagaaactatagaagaaaacttccaacttgatatacaaaactacgccgtagttgactttttctcttttatggatatagttgatgctttaggtggagttactgttactgttgataagagtgaaataagagaattaaataaatttattcctgaaacttataaatggaataaaaatgacaataaaggttctcttaaatatataagaaattctggtgagcaaaaattaaatggatatcagacacttgcattttctcgtataagaaaaaatgatagtacagatgaaagagatagaagacaaagaagtgttatacagagtttaataaatggtgttaaggatttaccagtcactaaatatcctaatctagttaacacaatacttccgtatgtaaaaactaatatgaatcctaatgaaataatatctttaggaaaagaacttttaagtataggaaatttaaatttgaaatctatggagtttcctctttctactgaaaatggtagaaaaataggtaatgcaggctatgtaataccttttgaggaatatgaactagatgcaatgcatgatttcatatttaaagatattatggttgaagattagaaattccaaaacaaaccaataatttgatgataaatacatacctcttaaatgcaaattgctttgtatttatggggtgtgtttttattttaaaatataaattacttttaaaaaatatattatatatacttttaactatacatataggtcgataaattttcttataaattatatcattgtcttttttttgtaactgaaacaagtattgaatatatctcaatactttaatataattaagtgtatgctattaaaaaatatacaggaaaaagaagaaagaaggggtacttttgtcaaaattaaagaaatttgttatactactggctttcttggtagtaatattccctataagtgtctatggatatttttattataaattatctgctattcatgactcgagcataagtagtgatttattggataacaatgaccataaaaatgaagatgggataattaacatactacttatgggaacagatgctagaccaaatgaagattcttcaaggtcagatgctatgatgatacttactattgataacaaacacaatgatatcaaacttacatcattagctcgtgatagctatgtagacatccctggtcatggtaaacaaaaacttactcatgcttatgcttatggacaagctgatttattaatacaaacaattgaagagaattttaatattgatattcaaaattatgcttgtgttaatttcgaatcatttatgtatataattgatgctattggtggcgttgaggttactgttgaaaaaggagaaatacgagaactaaataaatttattcctgaaacttataaatggaataaaagtgatgataaaggtagcatacaatacattagaaactctggaaagcagactctaaatggatatcaggcactatcttttgcacgtatcagacacaacgatacagcctttgctagagatggcagacagagacagattatacaagctataatcaagaaaacggaaactttacctgttactaaatatccaggtttattagatgcagttcttccatatgttaaaactaacatgaagcctaatgcaatactttctttaggagctcaagttttaaaaatgggtgacttaaatattaagcaatttgaatttcctattgatgatgaaattcatagtacaggtggtatatatggaaaagctggatgggttcttagatttgacccagatactttagacatattacacgattttatatttaatgacatagagtttaaacaataaaaaattcaacataaagtttattaaaaagtataagattaattactaaaaaagaactatatcgcataattattttcaagttgctgtgtacacttgattacaaaatgcatatagttcttttttattttctaatttatgatgataattttcattttaatctacatttataaaatactctgtattttaaattaacttttttattacttaactaagtttaagaaagtgtttaatgtgttttgatttataccatctccagcttcgtatactagagcagttttcttaggctctaaagcagttttctgagcagatgttacactatttccaagcataactactggtgattttaatttagctgctaaaggacctgatgttaatgcatctaccaattgattacttttacttacaaacattgatgaatattcagcatttggatagaatttttgtattacttttccatttgtttcttctctattttctccagctattctatttttagatacatcatttgtaatgaccttatccagcttatttattactgaatcagatatacttagattaccacctataaaataagcatcttttacttttaaatctgatatccaattgtaaacttcatcacttacattatcttttgatactagtactattggttgcttttcttctcctgcttttgaagctatagaaagagaatctgcttcacctgtaccacttgttatatatagtttttctactggattagtttttactaattcttttgctatcattaaagatgtactatatctatctgaaccaccaactctatttattgatacatttgacaatgtatcttttatctcactctcaactttatctccaatagagttatttcctccaattaaaataactttacttggattaagtctttttaactcattcttagtggatgtaggtatattatccttatttaccaatagtataggagcatcatttgatgtagcaagtggtgttgatgttatgccatcaactatagagtacccatttactaatactactgtatctgaatttgtagcccaaccttttttacttattgctactgctgtgtcatatctttcgtcgcctcttaatttctccactttaacattagatggtggagtaactggttcttcactactagaatataaactctttaaatccttttgtatagaagtactatttgctatatctttagctgagaaatacatactaccttttatttcactatactttctatttaatgttacttgttgtactatttcttttgctatattttgtccaccataactagattgaccttgcttatatataccttgtcctatgtataagtctacatttgttccttttacttcattagcccaccatgccactaatttagaataatctgctgctttaagaccaattggccagtaaagttgtggaactacatagtcaatcaatccttgttttatccatgctcttgtatctgcatatgtacctacataactttcattacctgatgtatctgaacctgttgggtcactactcttatttctccatatacctgctgggcttacaccaaatacaacattaggctttatactctttatagacgcttttacatctctaagtagagtatttacattttctcttctccaattatccttattttgtccttttccatatttttggtatgttgcagtatcattgaaacttactcctggatagaagtaatcatcaaaatgaactccatctatatcgtaattttgaactacttctgctatactatccactatgtactttctaacttctggtaaacctgggtcgtagtaatacttatttccatgtttaactacccagcttggatttttctttgctggatggtttgctggcaatttatctatgctctcatctgccatagttattctatatggattaaaccatgcatgaaattccattcctcttttatgtgcttcttctattaaaaatggtaatgggtcatatccagggtctttaccttgtgtaccggtaagatattcagaccatgggtttatatttgatttatataaagcatctgattttggtcttacttgaaccactgctgtatttattcctacactttttagtttgtccaataaatctgtgtattcctttttttgcttggcttcattattcttagtcttaggccagtctaaattataaactgtagatatccaagcagctctcatttccttatcatttgatgaatcggcaaatgaacttacactacacatagtaagtgtcattatcaatgataatactaatatacttatttttttcatttcatcccccttaattttttaaatttattttttctacaatatacttcttattaagtatatctaaaattcatattatctgtcaaatattgaataatatagttaaaatttatatttgatatttgattataatatgaaataatttattataaaaaaaacagcaaagaaatttatcttctttgctgtttttataacgttcatcactattttaatattactaaactcttaaatctctatgtaaaacattaaatgtaattatatatttaatgttaatattcaatcctatgtaaatcaatatctattattattgtaaaacacgtgtagcagttataagtcttcttgcataattagttcctggagccatgctagtaacttttactacatctcctgtttgtggtgaatgtatgaatttagaatctcctacatacaatccaacatgatttattgaaccacctgaaccaaagaaaactaaatctcctggttttaattctgctcttgatactttctttcctactgttgcttgtgatcttgatactcttggtaaattaacccctgctccatttttatagacataagaagtgaacccagaacaatcaaaagcatttggtccagttgctccccatctatatggcttaccttgttgcttaaatgctaagtttaaaacattttgtacctttgcatctacatttccaccttgaatagttaaataatctccatttacccatcctgtaacattgtcaacactttttattttaatccatccatttgaatgtaattctaaaacttcaactttgtctcctgtgtttatctttcctactactgcatcatttgcactagctccacttcttacatttaaaaaatcacactggtctactgttgcactcataggtgaattagttggctctgctgcactagccgttattgctcctgcttctactgtgacaactcctgctattaacaccatagctataaattttttcaatatatgttttttatttttaatattcatcataatctcaaatacctaatcctttcgaaaatttaacattttgttccttcgtttccaattcctaattaacattctatcttacatcaaaataaattgcaaccttttttgtaatctttttgtaatctttttgtaatcttttgtttctttttagtatatatttgtttctttttgctccccctggttacaaattagaaatatattctacttttctctagttgttgcaatttctttgatattagcatcttctggtttaatataagttggcactaattccctcataataccatctattttttcaacctcttcattgttagtaatttctcttaaaagttttaagtattttgttattttttctctatcaacatctattggtctaccaataaaaatctttttatgctctgtatccaacagaccttcttctgacataagtagttcttcatacaacttttctcctggtctaagaccagaaaattcaatttttatatcaacatctggctcaaatccactgaatttaattaagttttttgctaaatccaatattcttacaggttctcccatatcaagcacaaatatttctccacctttagccatagccccagcttgtataactaagcctactgcttctggtattgtcataaaatatctaatgatatctggatgagtaactgtcactggtccgccatcttcaatttgcttcttaaaaagtggaattacactaccattactaccaagcacatttccaaatctaacagcaacaaattcagtctggctttcagcattcatagtctgtataatcatttcagcagctcttttagtagctcccattatgttagtagggtttacagccttatctgtagatataaggacaaatttcttagctctatattttgaagacaagccagctatgtttaaagttccaaatatattattctttatagcttcgccagggctcgattccataagaggaacatgtttatgtgctgctgcatgaaataccacttctggtttatatttattaaatatttcatccattcttttttcttctcttattgatgctattactgtctttaaatctaatttatttttatattttctaagtaattcttgttgtattgagtaagcattattttcataattatcaactataataagctctttaggattaaatcctgcaatctgtctgcaaagctctgaaccaattgagcctcctcctccagttattaggattacttttccctcaatgtaattacttatctctcttaaatttgtttttataggctctctacccaacaagtcttctatctctacttctctaatctgttttatatcaacttttccatctataatttcgtaaattcctggtattgtctttattttacagttagtgtttttacatatatcaataatctctttttttctacgtttctctatgtttgctattgaaaagattatctcatctacattgtacttttctaccacagcttttatatccgaagttgttcctacaattttcacattatggattattcttccaattttatctttatcatcatcaattatagccactgctacttttttaagttctgaatttctttttagttcctgtataaccatttctcctgcatctcctgcaccaattataaggatatttgaaacctttcctctagaatatgtcttgttcatgactattcttatagctctataagctattcttgcgccacttgtaaacattataataaatattgtatttaatacataaaacattataggataatcaaaccctaataatttatttattatataaatcggaattaaataagctaaagttgccacaaaaatagatataatttcttcttctcctgcatatctccataatgtgttgtagcacttaaacaatctaaatgatactatatgaagtactatatatatacacactgaaattattatatcattagtggtaaatgcatttaaattacctgtcaagcttaaagacattcgaaacgctactagtacgctacaaatatctagaattaatagtgttaaatgtctaaatttatattttttaaaaagcctattaaaaaagctttctttctctaaatctatactttctcgcataactagaagccctcctttaaacagcaaaagctacgcacctaagcatagccaacaacatctatcttttgctgtattttttcattttattttttatatttatcaaatatagaatcataaattttttctatatcattaaagtttaaattaacctcataattttctctaacaaattgacgccctttcttacccatattaagtctaagttcatcattttccattagttttattatagcattttttatttcttctggttgttttggttctacaattaagccagtttcattttcccatacagattctggatgtcctcctacatttgtaactataacaggtacttcacatgcttctgattctatagctgccactccaaatccctctcttaaagaaggaaatacagttacatcaaaagaattaaaagtcttgcttacattttctggagatattcttcctaaaaactgaacatcattttctatacccaattctttagctaaatttattaggttgtccatctgacttccagagccacctattttaagaattattttcttatctttatattcatctttaagcatcttaaatgcttgtattaaatattctattccatattttttttctaaactctttataattcctattacaaaagcgtcttctttttctacttccataggcttaaacctatccatatctactccaaaaaaggttacatctacatgtttagctgtatatttattagcctctttagccatatctctactatttgaaaagatatagtctgcttttctaaagttatgttttataatttgtttttgtataaaaccattattagggaaatcataaatatcagtaccccaaacagaaataatatatggatgatacccaagtagacttcctataaatccataactacttgcatactgtgcatgcaatatatctggctttatttcatttactagcttctttatctgctttattgaacctaagtatcccgtttttttagaaatattttcattttttaattcttctacattagaaccaaaattataaatttttattccttccatgtgacctccatttaaagagattacatgaatgtcatatcctttatttttaaaaaaactacaccattttaaagtatgaggatttgacccatcagctaaataacaaacagtcttcataatatttaccttcctatcgaataatactcaattcctaactcttccatatctttaattttataacaatttcttccatcaaggactaaaggatttttcatcttttccttatacttatgtatatcataatttaatacatctttccattctgtcattataaaacatatctctgcatcttctatcgcatcatctacagaatcagcataaagtatagagtcaccaaatattttcttagtattatttacaccaattgggtcgtatacagtaactcttgcccctctttcaagcaaatattttatatttggtatagatggtgcttctcttatatcatcagtgtctggtttaaaagtcaaacctaaaacagcaactttcatatcttgaaagctctctactaacttagatgcctttctaactaatttaagtttttgactttcattaacttctattgcagcttttactgtttttaattcataaccattatgttcagataaccagtgaagagcttttgtgtcttttggaaagcaagaaccgccataccctattcccgcctttaaaaacttacttcctattctatcatcataactcattcctaaagctacatcttctatgttagctcctgctatttcacaaagatttgcaatatcattcataaatgatattttaagagctaagaagttatttgatgcgtattttatcatctcagcactatttctatttgtaactattataggttgattaaaaggcttatagatttcttctaatatttctctagcccattcactttctacacctataacgattcttgaagcatatagagtatcttttactgctgttccttgtgataaaaactctggattagatgcaagctctacttttacattattttttaggtttctatttatataatcttctatctcttcatttgtaccaattggaactgtagattttattactactagagtatcttttgtcacagtttcagctatttgctttgcaactgcctttatataatctaggttggctgagccatcacttctctcaggtgtacctacagctattaatattacatctacatcttcataagcttttttatagtctgtagtgtaatctattcttcctctgttgtaatttttaaccataagttcttctaggccttcttcatatataggtgctattccaagtttcattgatttaactttttgttcatctacatcaacacagactacattttcattgcctacctctgctagacaaacacctgtaaccaaacctacatatcccgtcccagctatagctattttcatttttttacctccaagtatataaaacttatactctttttttaatggcattaaaaacatagaaacaaaatacatatagactttttggtaaacttaaattttcaacatttctataagtattccaagttcgttttaatgcttttatcttgttacttgatatagaatttccaactaatctgtaattcactaaatcctcctgaatcccatatgcatatttttcctttttaagtaactgtaaccaggtcgcagtatcttgtcctcttcttaccaaaggcatgctgaactctcctacaatctccttatcaatgaccactgtagaacatcctattatagtatttctaagtaatccttcatagtcaattttcttaggagctcttgcaaccttattcgtttttgacccatcttgtctcatatatctataagatgtaaaagaaaaacctacattttcttttaacatatattctatctgaatctctaattttctactatcccataaatcatcactatctacaaatgcaataaatcgaccttccgcattcttaataccaacatttctagatactgcagctccagaatttttttcaagctttatatattttattctagcatcttcttttcgaaaactttttataatttcacttgaattgtccttagaacaatcatccactaataaaagctgccaatttttataagtttgattttggattgactttatcgtctctgataaaaactcttctgaattataaacaggagtaattatcgatactaaaggctcattcatatttttactctccttatatagcaactagcagtactataccaacaagtttacttagatactaattttctttgtccaatatatttgtaatatcctaatgggaataatgctaaatacaacaatttatcagatacttttcttaattcaccaaaataatgactatcagacaacaatgagtatctggctaaatttatgtaattttttatccacatatatggatatctacttaatggatatgtattttgatttattaaatataaaaactctaatgctctacctcttaatgcatttttacttaatatattcttagtcaaaccatcatccaaataatctcttattatcataggtttatttacacatataactttatagtatttagacatttcattccatactacactttctggtaaaaatctcacttcttttctttctggaaaaggaaattttataagctcatcagttacaaatactatgcttttatctcccttaacgccatacttaaaatataggtctgcaaagtgacatattttcttatcttcaggcatttctgtccctatcaaatctccacttggatatacacaaagtccaacaactccactaaatccttctttattctctaaagaatcccactcatcattagcaatttcaagagaatctttaattaaaccatcatcactatctacaatgaaaaatagctctccatctgcattttttacacctagatttattgcagtatgttttcctccattttctttgtatatatatcttatatttaatttattttctgatataaatttttcaactaactctttagtactgtcgctacttccatcatcaacaatcaaccattcaaaatcattgaaatcataagtttgagcttttaaatcattgtacaaattttcaagtaaatgagctctgttatacgtcggagtaaatacagtaaatttatatttatacattaattaaatcttcctctctgtctaactttttttgattccgtttattccataattaataaagtagtatatagctttgtataaaggtattttttctatatttctatatatattccaagtccacatagcagcttttattttattaccacttagggaattgctagattttctatataatgctagaacttcatttattccatgagcaatatgcccttttttcaatatcgataaccataaaacatagtcttcatgtcttacaccactcattcttatttcaaaatccaatttagacttatcaatcacaacagtaagacatcctaagatatttccttttaataatcttttataatctacattaggtggaacttttattactttgtttaattttttatcattttcatccatcagttcatatgaagtaaatgaaattacatagtcattttctaacataaaatttacttgtttttctaacttactgctattccattggtcatcactatctaaaaaagctataaattgtcctgttgccttacttagtgctaaatttctagcattagagacacccttattagtctcagtctttatacattttattctactatcctgttgcatataagatttgactatattaggactattatctgttgagcaatcatcaataattaacatttcccattcttgataagtttggtttaatactgattttatggttgcttcaataaatttttcagaattatacatgggagtaattatagatactaaattcttcttcatattaccttcctcatcatttataaaatatttatttaattttacttaatacacaatcatatatcctcttgcagttcttattatcattatatctgaaaaacttatttctttcatttttttggttatccataacctcaaaattattttcaataatatcaataagtttattcacggcttcatcattattataagccaaagacccaaacatttcactttttaaatctatatatgaatcaactttttccatatattcatccaaatcgaattggtaaaacaagataggtctattcatatacaaaaagtctatggctacacttgaataatcagttatatttgcagctgattttctgatttcatttgctagagttacccctttatctaaaaacacaattcgttttcctgttatattttcttttatatcatctataaactcatgcataagatgatgcatataaatttttacatttatatctttctcatctaatattttatttaatttgtcatcatttaaaaaattcattatatttttaaaataatctgtatccgtaaattttcctgaactaaattttatccaatctctccatgtaggagtatataatatatctcgagtttgtgcaacttcatttgttggtaaattgtcatatcttgcattcccaattatataaactgagtcatctaacattccccaatcatttaccataacatttctttcaaattcagaacttgctgtaactatattatagcttttatataggttatctataatatttttgaactttttgttcataggttttctttttttaaagcttatagtcccatgatttaaaaacacttttatcgtttttttatgaaaataattaagaacaggtacagcaaaattgtatggtgctatatctgctgatggtgcatgtgaaaatactatagcttttgaattgtaataatacagatagttttctacacttcctcttattaattttttgcctggaattttatcaaatactttactgtctttatttactacccaataagtttctacatcattatgttcttttagcatatactcataaaaaaactttgaattatcattgtatatatcccctgaatgtccacctataagccagatatctctaccattaaacttatgcttattaaatggatatataaaaaaagccaaaagcatatttattaaaaatttaaccttgtccataaacaccatcctcattataacttgtactgtctaaatccattaattcttccttttatagtggcactatgataatctctattggaactcaatataagaccccctatatttcttacaagttttgataccataacttttgcaaacgtataattttttctatagactatttcctttttgcaaagcgctccaaagcctcttccataattataatctttttgatacttttctttagatttagaatgtttttttgcaggatggtaaattatatcatttccaaagtattttcctttaaaacctaaactcaataagtttaaaacataatctatctcttcaccagcaccaaactctccaccaacacccaatttttcatcaaatcttgtataatctttaccttcaaaatcaataaaaaaagttatggatgttatagtatccaaaacgttggaacttgtgatatcacaagttccatcatacattttcttaaatgcatcaactttatttgaatccatagttttgcaactgtatattttataatcttcatttttattaaagaaatttataactttttctaatgtatcattttcgtagacacaatcatcatcagggaaacctataatttgccctacagcattatctatgcctacatttctgttataactcaatccttttttagagctttttatatactttatatctaacttatcaatgtatttatcaactatttctttaactttgctattatcattttggtctactactataagttcaaagtttttgtaagtttgattttctaagctatccataagtaagtatatatcatcatatctatttaatgttggcattattaatgatattaacattactacctcctacttttcatcttccacaaatctatttcccttttatcatttaatatcacttcttttattagtaatactactgcaaaactaaatgaagcttctaataataaattttctgcaaaagagtatagtaaaaatataaataaagctactaaatatgcttttttatctttttctataaagctttctattcctttatacatcaaatacataaataatatacaagcaactactcctagtacactaattatatatacataagaactatctaatggattagttgcttttatagcaggactatatgaatttccaaaaggttttagaaaattccccttttcagccaagtatacatgccagaacttaggtctacttgctaataatctatttaataaagtgcttttatcaaatattgtaccaataattacactaaatagagtaagtattattggtaatgtctttaggagcattggcagtccttttattttttttatatctatccatcttattatttctacaaatattaatcctgctaatatagtgaaaaatccagttctactatatgtggtttgataaacaaaaaatgcagaaccaaataaaattattctatcccatttattataatctttatatcttaagaatatatatgctgcatatatagtaaccatatgataaaatacactatttggattaccaagtccaaaatccattcttgtaacaagcatatctattttttctatatatctatagtggacttcctgattaaatattaatgaaggaaataaattaaataataatatagctaccattaaaaaacatgccgatattattaaataatttttaactataaatttatcatctatttgcttagctgatacagctaataaaacgattaataatatagctccttccctatttaataaataaagtaagacacaaactccaactagtaccatttctgttatactttttctcttatcaaataaaaaaagtagcattagtattcctattgaagaataaaataacgctgatttaatcatccctatatctatatttgggtcaataaatgatatcatatactttctaagtaatatgataaacaaaacaaatatataaagatattttctaatcataatatttctatcatcatttaaagtcttcattttactttctcccttttagcttcgtaaagtattacttgcaaatattttacaacacttccatatcttatttacacctgttaagtgtttgctttctaagaaataatttctctttttagcccaactttttccccaccaatgtatcccaaaagtgttttctgttatacattctggtgtaaagtcttctttaaatccaaaaggataaaaatattctttgtcgtaaacacgtattccttcttcataattatttgggtcaatcttcttataattcttttccataagatgagtcattatttttggtattgtaaacaatgaagaagtaagtacttctttttcataatactccaataagtcttttaaaaaaggatgtcctttttctacacctattatagcaccatttatatactctctatcatcttcatacccacagattagcctattattttctaaaagaggagttatatcctttaatatttgcatatctgtatccatataaactccaccttgttcatagagtacttttattcttgtataatcagatatgaatgcccaaagttttcttttataacattcttccaaaaacttatttccttttatttctttctctatatcaaagtttttttcattccactctactatctcatattctggaagcttttctttccaagaatttatacatatattttctatatttccttttggaccaccaaaccatacataatgtatttttttaggaatcaaatgaacacctcctacatatattcttgtctatcttcttcttttaactgttctactatttttttgacatcttgagctttatcttttctacaaaccataactgcatcattcgtagatactactatcaaatcactaatacctattgttgatattaatttgtcatctgaatatataattgaatttttagtatctatagtaatattttcacctcttttgatgttaccttcatcatcagttggatatattgcacctagagaatcccaagaaccaacatcattccatccaaaatcaccaggaactactataacatcattacttctttccataataccataatctatagagattgattgtatagttgggtatatttcttttattttttccatttcttcttttgttcctaagtatttacttatatattctaatttttcatatacttttggcaagtatctcttaaaatcttctaatattttagataccttccatacgaacattccactattccatacatactttttagagtttacatattctttagcaatttcatagtttggtttttctacaaactccactacctcatatgcaacatcttctatcgtattttctctattaaaatttatgtatccatatcctgttgatggaaatgtaggagttatcccaatagttactagtttatcattattttctgctatatagatagctttttccaaaatagatttaaattctttttcatcttttatataatggtcagctggatatacacacataacaccatcaccatattttttcattatgttaaatgctgcaaagcctatagctgctgctgtatttctggcacatggctctggcaatatattactatccaaacatttatcttttactatatcctttaaagcttccaattgcttctcattggttactataaataaatcatctttttttgctagagaatctattctgtttatagtttcgtttattaaagcatcttctccacttaaatttataagctgtttaggtacttcttgtctactaagtggccagaaacgagttcctcctcctccagccattatgacattgtatactttcattatttatctccccttagctttttatatagaatccactacatttaatatataagatattaaattgttcaacttaaattctacatcttcttgattgtctgaatttgctccaaagtaaaatttaattttaggttctgtacctgaaggtcttatagctatccaagagccatcttcaagtaaaaatttaagtacatctgacttaggtaaatcatcaacaccatctttatagtctaaaattttatctacttttacatcagccacattatctattttaacacttctaaagtaaagcatcatctcttttattttttttattccatctataccttttaaagttactgactttaagtcctctttgtagtatccaaatttattatatgtatctatcaaagcttcatacaagttcataccttttgaagaatagtatgctgccatttcacatatcataagtgaagatacaacaccatctttatctctagcatgagttccaattaagtaaccatagctttcctcatatcccattataaaacttctatcattgctttcttcaaacgcttttattttttctcctataaatttaaatcctgttaaagtatttaaacaatctacattataagcctttgctatttttgcacctagttctgatgtaactatagtttttattattgtaggattgtttttaggaagtttattttcttcaactaaactctctaatatatatctaactaaaagtgaaccgacttgatttccatttaagactacatattcaccacttgaatcttttacaacgatacctactctatcacaatcagggtctgttcctattatcaaatcagtgtcattattctttgccatttcaatagctatattaaacactgacttttcttcaggattaggatactttactgttgaaaaattagaatctggtaattcttgctccttaactaccattacattttcaaaaccacattcatttaagacttttcttactggtttatttcctgtaccatgaataggtgtatatattatttttaattttttcccgtattcatctattatattttgtcttaaaacttgcttcttaacagcttttataaactcatcatctacttcattatctaatatagttattaaatttttagataaagcttcttcaaaatctatacttttaatagtgctgtaatcatcaatcttattaacttctgctattatatcatttgccatatctatacagatttgaccaccatctgagtcatatactttatatccattgtattctttaggattatgacttgctgttattactattcccatagcacactttaaatatctaacagcaaaagaaagttctggtgtaggctttaattcttcaaaaatataagcctttacaccataagcacttaaagtctttgctacttctatacaaaactccctagacatgtatctactatcatgtgctataactattcccttttgtttaccttcttctccttgagtcttcatgatataatttaaaacgcccagtgtcgcacgtctaacagtataaatattgattctattagttcccgctcctattatacctcttaaaccacctgttccaaactctaaattcttatagaatctatcttgtatttctttttcatcatcttttatgcttaatagctcattttttgtttgctcatcaaaataaggagaatttaaccacatctcataattattcttataatccatattttcatcctttctgactctaatttaaaatttcaaggtaattatcttcttctaagtagtttttgttttccttttcttaaaaattcaaaagctaagtccatctcttctaccttaaataaaactatcaatacagtatatacagaagctccacctaatactccagctccaactgatataatttctttaattgttcctgaacccataaatgcatatagattattatatatcaataaagtagctactgccatcacaccagatgctaccaaactttttagaccagtctttataattttatcccctccaaaatatccatttttctttttaagagatataaataacaatataactgtaattatattggatgtactagttgatatagcaatacctgcatgacctaatggtcttatcaatattaaattaagaactatatttattattaaagctatacttccatttatcattggcgtttttgtatctgaaagagagtaaaatgccctatataagacatctcttactccacaagccaataaacctagtgaatataatctaagcgctatagatgtaagatctgttgataacgcatcaaatttacccctttgaaataatatcctaacaagaggctctgctaatataatagctcctatagatataggaagcaccaccaatataatacaatttgaagattttacaatagtacttataaatccttctttatcatctttaccagacatttttgctagcttaggatatataactgttattatagatgtaacaaataatgccataacaaactcatttagcctatttgcatagttaagagcagacaactttccatcacccaaagtagttgccaataatctgtcaacaaatatatttaactgtccaacagctactcctaccaacataggcaatactaggtttactaattcttttatagactcatcctttaagtttatatatggcttatacttgtaggacttcttaaatgcaaatggcagttgaaataatagttgactcgccatagccaatagtgctcctgctggtagtatccatacgtttttacctgcacttagtgctattgctgctattattataatattatatgggattcctataagcccaggaattacaaaactgtcattcacctgtaaaaacgaactaaatatcttacttccacttaggaataaaactcctgaaatcattattttagtaaataatattgctgcttggaacttagcagggtcgtttctaaatcctgctgcaaatactgtaacaaattgctctgtaaataaaagcccaataatagctattactatagccattatatagcatatatttaaaacattattagtaaattttaaggcaccttcatctccgagtcttttctttgtctcaaagtacataggtatataagttgtagcaactgcagagcctatgactgctatgattaaaccaggtatatttaatgttaatacaaatacgtctgcatacatacctgtcccatagaaatttgcaagtacaagttctctaaggaaacctaatacttttgaaaacatagtggctgccataatccacaatgctgctttagctgtttttgacatcttctttctccttatctaatttaaactctaaaagtagaacttttaaaactgcttataaacattattctaattaagtaaatttaacctatgaaaagcttccttataaattaaaaactatttcgactcatatctaagtgccctaaatgtaatcaatagtaataatagtattaatactatacaagataagaatgttagattaaatatgctcttaaatagactataatcacctactgtatacccaacttcaactacatcatttatattgctatctttcaagaatttatcttgtgcacgacttaagttatcactacaaatcagtattggcatattttcttttgctgatactactcccaaagaaatatattcgtttacatcagatctgctaccaaagtctaatttagcagtatagattttctttatatctttttcatcataaaacttctttattaaatcaacatttgtacttgacttatttatttgctttattccttctatatttttcaagttagaatcaatctctgcaataaattcttttgaatcacctaatgcatatatttttttaagattcttaccttttaagaaatcaatttgttcctcaaacccttcatctttagcccatattattggcattccacttttagcggcataagaatatacagatatggcattctctaatcctgttgttgagctaagtaaaaatgcttcatcaaatcctactgttctatacatttctctagctatctttaaagatgtatcatatctgtcttttcctcttattctttctacttttattcccattttttctatattacgttcagcatctttagatactgcctttaaaccacctactatcgtaaccttctctggacctagttcttttagataatttcttgttactctaccaagatttttactcttagttacaactattggagcattttttgcatatgctaaaggtgttgcacttatactatctacaattgactcttcatttacaagaattacttctttagaatccttaaatgctcttttatttaattctgtcgaaatctctggtatactcccttctatcaattctcttttgggatttgcatctgcaaatacctctattgtgctagaaatagagattaacaaaactaacgataatatagtagaaatttttttaatcataagttctcattccttttcttttttgtattttttgacaataaaaaagctctttttaaagagctttttcattgattagtaatctaatattttaaaattatctagctccgtctcctgtcaatactactttaacagttttaaagagtatcttaaagtcaagtaatatactcctattttttatatagtaaatatcttctttaagtttttcttcaggagtgatttcgtatccaccatttacttgtgcccaacctgtaagcccaggttttatagcgagcctgttgataaatccaggtatttcctcattgaattgaacagtaaagttcggtctctctggtctagggcctattaagcccatatccccctttaatatattaaacagctgtggaatctcatcaattctagttttcctaataaactttccaaccttagttattctaggatcatctttttcagcccattgtgcgccaaatttttctgcgtctgttctcatagatcttaatttatatatatagaatcttctcccgcattttcctagtctttcttgcttataagttattggtcctttgtcctctattttaataagaattccaaatattgctattaaaggtaaacctatcacaagtcctattatagataaaactaaatccataattctttggtacaagtcgaataaaaccgttccttttactatgctatagtcaatctcacttgcaatttctttatctgcccctggatagcttttaattttaggtatttcacactcatcattagtatatccagacatagttacctccatattggaataaaaatttttttaattcttaatttcaacttatttctatcttatttttgacttatttctatattatactcaataatgagcagattatcaatacaagaaacatcattgtaaacaatttgattctttacaaaaatatatcatctcttgttatattttacattataacaggagatgatatgttttgctttaatattttttattttattttactgtatcttctattcctattccaatttgagttcccattgtttttactttttctgcagtatttaacttatccatatcgctcttattgtcaataaatgcacattcaacaagtattgctggataattgttatttcttaacacatataggtaatcttttccattatcaagtgttcttgtcttgattcctctatttttcatgttaaatttttctagtattctttttaagatatttgatgctgcagtcttagttgttccaccatttttatcttttactttgtaataaatttccacaccattaccagctccattagacgcattgtaatgtatacttgtaaataaatctggctttatagtgtttgataatgctgttctttctcctaaagccattgttttgtctgtatctctagtcataacaacatttataccttttgaacgtaaatattcagtagttgctaatgctgtattaagagtatatttcttttcttgtgctccaccatttaatccacttgttgcccctgaatcagaacccccatgacctgggtctatcactacagtttttcctgctgctgaacccgaattatctggttctgttggtgcattgtgttttgataaactagatgctatagaatttataacactatctttcatcccatcaccaatttgatatactgttcctgctgttttttctgataagtttgtgctatggtatgcagaaacataagtctttggagttataagtattggagcttttaatttagctgctaaaggtcctgctgttattgagtcaactattatgtcagattttgcaactaacattgcactcaactctttatctggatagaaagtcttaattacatttgcatttgtttcatgtctatctgctccagaaactctattttttgaagtaccattttttgctattttagatatttggtctataatttttgatgataaactttgactaccacctatgtaataagcttcttctaaaccttgtgaagataaccaattatatgtaccttgtggtacagagtctttattagctaatattataggttgttggtcttcaccagcttttgatgaaatattaagagcatcatattcaccagcatatccatttgctatgtatattttattaacatcatgatacttatctatttcttttgctataagtaaagatgtttcatgtctatcaactccaccaatacgagttacatttacatttacagcagatttaatttgagatactgccttttgtgaaactgaaccatcatcacctataattattacatcacttggatttagacgttttaattctgcttttgtactttctggtatatcatctttatttgcaagtaatattggtgcatcatatgtagatgcaagtggagtagctgtaattccatctgctgctaattctccattaactattacaaccttactagacccatctttccaaccttgtttacttatctcaacagcagtttcaaatctagtagctccagcaagtttttttactggcgcagaagtttttctcatatattcatttactgcttttgttgaatttgcatcacttattataaactcttgtgtaacatcataatccttaagatttaatcccatagactctaagtcttctttgtttaaaactttctgttcatctttaccatttatttttatgctttgaagttcccatacatttaagtattctgggtctttgttatagtttattacaccttcatatgaatctgtcttttcattgtaatttaaagtagcttcaagtggcatatcataacacataaaatttaatgttattgaatcagcatttaatttttctttaaattttacacttgcattagatttacttcctaacactacactttttctttgtaaatttatattaatatctgaattagattctgtatttgcagtagtattttcagccgctaaagctacgtttggtgccaccattgctacagacaacattcctgttgccaataattttgttgtttttttcatcatatcccccctaattttttggttctttaaatctttaaatcttttttaatacatcttaagcttgttttatattacataaattcaatattatgtaaatcttttttcattatagcacaaaaaattacaaattgtaaactttttgtaatcttttatggcatggtttttaaattttatcgaggagaaattttgattatatttgatagtttccgtatatttgaacaaatcaaagactttatcatctaaaaatattgcactaaattttaataaatatttttttcttgtacattatagacattactataacccagaataggacatacaataaagaaaatataagagaatcccaagttgtacctgcccaaggtgttataagttcatatgtagtccactctaccaaggtagttggataatcgactttgttcgtaagttttggaacattccaaaaaacatgactcaatatctcaaggcacatatatgtaaaaatagggctacttccaagtgctattattggggtaaatattttacttttatttttgatgtcacatataaaataaaatattgacagtaacataccataactgccagccattaaaagtacaaatgagctagaccataatcttttattaaatggaaaatactgattaaagataaaagcacctattagcaggattatgctcataaccagtattttaaagaattttttatattctcctatgttttcttttaaaagtacacatcccatagtgcatcccaacatacctgaagaaattgctactatactagttaaaaaaccatctggttcaaattctggcttgtacaaatgtcccttgaagaaatgtaaatccactaactgtgcaagagaaccttctagctcaaatccataaggttttgctaatatgtagtacccaactattataaatgtagctatacatagaaaagtaattattgtagcagtacttccaacatttaatttttttagtagtaaatatactaaactagtcacaaaatagactaatcccatacgttgaagtactccaagtattctcacagaatttaaatcaggatttcctaggtaatttaagaaaaatccaaataatatcaataagatacttctcttgaatatactaagtattatactcagtgtggatttattattttttagtttactatttattgatattggaattgtaacacctaaagatataacaaaaaaaggaaatgcaaaatccgcaagtgttacaccatgccatacagcatgtcttaattgaggatacattctcatccaagtcccaggattattgcagactatcatgagggctattgatagccctcttattatatctattgatttaatcctactattcgtaagtttagaatctacaacattatttgaaattttattgctattgctattgctattgctattgctattgctattgctattgctattgctattgctattgctattgctattgctattgctattgctattgctattgctattgctattgctattgctattgctattgctattgctattgctattgctattgctattgctatttagattatttttctttattctagttttgtcaatacttttatttatttttttgttacattcaattccaatccccatgttacctccccaaagcttattcaaatatatactaaactacatatttatctataagtctgtttgtatataaacctgtttaactatataactttagaacaattacaacacacacttcacttaaatatacatattcttaactaagaaatttctttagaaatccaatcttatctagtatatcttgtattttattgactttttgacttatagaatctatagctttttcaattgaatctactttagcctctaaattctcaacttgattaacttttttatctatagtaccattattagttatatcactattagatgaattatctataagctttcctatatatccatcattaatcaattttgtatcattagcagaagctaatatcatcaacgtatctatatctgaatttctagtattttctataactctaccatttttgtcacgaactgacaatatagtgattgtatcatggttattaaatccaccttctccaatatttctaactataacatttaccaaagtagcatagttattcacttcaccattaggcatatctactgtaagagtctttgaacaatcaccctttatattcacagttattggtttatttgttaccattctaaaagcttcatttacagtattctcttttggtttaaagtttataatatcattaggacttgctatatttatcatatcagttaattcctcaacagtttttgcttcaaacacagttttttcttgtaaactcttaatttcatcaaaagcttcttcatttccatttccacctacctgtgttatagtatttaattttttagtactaagtatatccctttgtttcgtgtttaatttattaccaaccaaaacaacaggagactcattttttgcagccaatactccaacagctaacgagtctattagttgattctcatttttactaccatccttagttacatataaattacttaaatttgtatcagtataaaacttttctataactttggcattagtctcatttctatcttttccactcactctttctgcattaggaaggctcttttctacagctcttgaaacagaatttgttcctccaattacgtatgcttttataactttctcatctcttataaatttatcaaatgcttctactccgtccttaggactagacaaaattataggcatcttattttgagctgctggtgctccaacactaacagcatcacttaatcctttttcaccatttactacagcaacttccttaatatcttttatatccttaagcttattagccaaaatcagtgaagtttcatatctatccttaccattaattctttctacattaagtccattaccttttaacttgttctctatatctttattaagtacagcagtacctcctatcaaataaatatctttagctcctagacgttttatctctttttcagtcctatcatctagcttatcactttctgtcaaaagtattggtgctcctttagcctttgcaaatggtgtagctgaaagtgcatcagctaatgaattgtcattaactaacactacattagaactagaactgtatgccttttgacttatctttacagcagtttcatatctaccattacctattaatttttcctctgtaagtgcatatgatggtattatagaaatgctacttaaagtaagcgctattgtcagtattgttaaaatagtttttggtgctttcattattattcccccttattttgtttaaaatcttactatatttatattataaaataactttacactattttacagtttaaaattattacatttttcatcaataataagaaaactatctaaaaatatagacaagcctatttttcattatttaaatgataaaaatataaaacaacaaaaaagagtgcctcatgaactaaaaagttcattttgagacacccctttttgttattttatatttataaacttctattgaatattttttaataataaaatgtatatccttactatctttccattcactattttcctaaaagagtatttagttcattaaaagcactttcatttccatttccaccaactctaataggagtttctattttcttagacttaagtacatttttttgactttcatctaacttatttccaactagaactactggtgaatcagttttagcacctaatgctcctactgctagtccatctatcaagtctccttgactctttgaaccatctttaacaacaaaagcatatttcaaatctgagctagggtagaatttatctattatcttagcattagtttcatttctattacttcctgcaagtcttgttggatttgaaagcttactttctaaatttgatgataaagtagctgtaccaccaattatataagacttagttatttttgatgaatttaaaaactcatcagcaccttgcaactcactcttttcattagtaagtattattggcatattgttatcagcagctgctgcaccaatacttattgcatctgcaagtccatttacaccatttgccactgcaacttgtgaaacagattttatactatttaacttttgagctagagatatactagtcttgtatctatcactacctgaaattctttctactgatatacccatattactaagttgagtttgtacattcttgcttaaagaattttctccacctattagataaacttttttagttcctaatctttgtaactctgccttagtttttgaatctaagttatcttttcctgttaaaagaattggagagtcgattgctgctgtaaatggtgtagctgttaaagcatccactattgcgtctccatttactaatactgcattttgtgaagaagtccatcctttttgactaactttaactgccgtttcatatctatctgctccagttaaagattctcctgaagtagcttgtccagaagatgtttttgttatagcttttataacaaagttacaaggagaaaattcactatatgtatttatatcttcaaacttattgttttgaagtatgtagctttcacctaagtttgctttagcctcatatagatagtatccatctatatcagtttcatatgctaaagttgatttttctctattaggatttgctgtgttgtctataactactactattgctcctttaccttttggtaagctgtaagaattagtaggtacatttatgtatccagaatatgatactgttccacttgcaagttttgtcattgagttgttttgaggaactccatttactactggtgcataatatacttcatattttgctcctacagagtctgtttcaaacataacagagtcaagtttttcagaatctctgctaaaatcaaatacatttgctgctgttactttatttgacattatcttactaagaccagcatattcaagttggtacatttttttatcactatctggtttcgatactgatttcattgcatagttatctgtatctgttagtagagttttatcttcataagaaatccagaagaatcctttcatagaattaaattctccccaactgctttttactaaccatgctccatttgattctggttttacatcagatgcaaagttatcttttgaataattatcatcccatcctactatcgctacagcgtgatttaatggagccctcttatttgtacagttatatgctgtttcatctttattaaaatatgtcgaataatgtgcataacctgatgtcactgaaccatattgcattatagcattttttacagtttccttatctttattaagacgaacaacatctgttacattaaattgagtaggtgcagtatccatatttgaaggtttagttgcaccttgtgcctcagatttaagattatatggtatatctttttctaacttaggacctgcccatgctgtcagatatcctatggctgttacatttgaactacctgacatatcatctaagttccatccatattttccaccagttgcccaccatcttaaatgttcttctgataagtcatacgttccatatccctttaatttaagatatgcttctaaagttgacatacctgaaaaagaccagcatgtattaagacttccttgattttttgctggtgtagtaagaccaagatccattgggttgtatgctacacttgatttatatgctgatggaagactacttctgcccttatttcgaagtgttgtaccttccatttcatgtggaaaaggtattactccattatattttgctgtgtctccatttttgacatcttctaggtattgaagataactttcagaatactctgcagtttctactccatctagagttttatggttttctgctgagacaggtattgttgacactattaaaaagcaaactgtcaacaatgccagtagctttgacaatttttttgatttgtactttctcatgtttacccccttatatgtatttaatttttattatatcagatttctaaattaaggtcatattttattttgataaaatatggattatgagtacatattaattatagaatattatagttttatttttataatattttaagatatattgatttattaatagatgtgctatactaatgtttgttagtatctttaagtatatttatattaaattagattaggaggattatatttgattttaaaaaagcatagagagacaatattatatttattttttggagcatttactactcttgtaaatatagtttcgtatttattttttactagagttattttatttaattttatggttgcaaatgctttggcatggatacttgctgttttatttgcttatgttactaataagttttttgtatttgaaagtaaaagaattgaaataaggttcgtatttaaagaatttttgtcttttgttagttttaggctactttctggtgtcgttgaaatgttaattatgtatgtaatgattgatttgctttttgtaaatgatgttattgtaaaaatatttactaatatagttgttatagttttaaattacttgtttagcaagatgataatttttaaaaaataaatagcagattactaaatagtaatctgcaaaatgaataagtttaatgtctaaattccatcatctgtaatgctagattttccccatcgtgaaacttcattatttgaggtatctatttctactgcttctatatatgatccatctttggctctttcaataaaagattgatttgatattgtaaccatactccaacctttagtactaattttttctccaacatatttcgcagatggtttttcatcaactactctataataaattttatactttgaactctctggttttgttgatatagttattcttacataatcttttaaagcaggtatacaagattctactttaggatataaaccacgtgcctttttatcttcatctttatctgtatcattagttataggttttttaccacttattgatggttcttcacttccacttatagtattaatattacctgaattttttattgttacactagaagaattattagatattttagttatttctccacgattcaaaatatatacatcttttgaatttttaagtatcgttataagccatatttctccagaatcctcattctctattttacatccattctcatcataaacatctatcccttgtatacttccttcgttaactaaagtctcattttttatattatttattactagatcattatctatgtccccaaagttttttatatctccatttggcatatctatagttattgattgtttatatataccatcaaattcaatagttatagctttatttgtttctattttaaaagaattagttatatttttatctttttctggcttaaatcttatgatgtcatttgcatctgatttttttatagcaacattaagttcatcaatagtttcaacagtatacttagtttcttcttgcatatctattacatcttctacaacattttcattacccaatccgccaatttgaataactttatctataattttagtgtttaacacatctttttgagaactatctagcttatttcctgctaaaagtattggagaaccatttttagaagctaatacacccacagctaaagaatctattaaatcatgcttactccttgtaccatcctttgttacataaatattttttatatcagtatctttgtaaaattcttctataatttttgcatttgtctcacttctactactacctgctattcttgttgcatttggtaaacttctttctacagaattagaaatagaatatgtaccacctattacatacgatttttctatatctttactatctataaaattatcagctacttcagttccattctctgaatcagaaagtattattggcatgttttcttgagcagctatagctccaacactcactgcatcagcaagacccttttctccatttactactactattttagatatagatttttccctatctagcttttcagctaattttaaagaagtatcatatctactatttccagatattctttcaaaacttatattttctgcatttaactgcttttcaatctctgaacttaatgcaattgaaccacctattaaatatacatttttcacaccaagtctttttaattctgcttttgttctactatccaatttattactttgagttaataatattggtgcatcttttgctttagcaaatggagtagctgataaagcatctgctattgaattatcatttactagcacagcgttttcagactttttccatcctgcttgacttatttttattgctgtttcccatcttccagaacctgttaatgtatcttttgtagatgcattagatgtatttccatataatgtaacagttaaaaatgtcatagttaacaaagacactatcttttttgatattttcattaattcttacctcctaattctttcataatattttatggagcatgtacatactgtattttatttatagctagctcatcaaaatgagattttactgaatgatatcctatagcataatgtccactttcaggattccattttttatatgcattcattgcacttaataacttctcctcttgactaggtaataccttccatacctctacatttggattaacttttttaaaatccttatagtcgtatggttctacataaaatcttaaatcttttattttgccttctttatataactctagtgcagcttctcctaatgccctatggtcttcatgtattccactagctttaaacggagtaacagtttttacttttgcatctggatattcttctaagtacttaagtattatttcccttgccttttctttacttaactcaccatcatgtgctctattatcttctatatgtatattactttcttttacacccattgcttcacagctatccttaaattcttcatctctatcttttgaaaattcactttctgataaagagtatttatgaacatctttaatatgataagaacatgaccctccatcatccaaaacttttcttattatagatttactaccatctgtgcataatatgacatgtgtatcacttttttcaacatgttcaattatagcacttcccatacttaaggtttcatcatcttgatgtggtgtaaaaaataaagttgcatctaccactactacatcctcctactttataaaatgttataatttacaataaatagcataattatagaaaaagattcctgtattaattaaggaatcttctccacagtataagttattaccaacctagtattttagctatcttttgtattactgtcaattcaactccattacctatttgagttacttctgcaccaagatttaattttttactaagtgcattcctttgtgagtctgttatatcagctttagctagaagtattggacctttacctgctgctagaggtcctgctgccaatgcatctactagcataccattatttccatatccatcttttgctatatatagtttatctaattttccataatatgtttctataaccttagcattagtatcgtgtcttgtttctccttcaactctttgaacttttctatctttatcaacatcagcaagttgattttcaatttgactagatacattgttagaaccaccaactataccaatctcttttccatccatcaatttgatagcgtctgctgaaagatcattccagccatttactattataggagccttaagttcagcagctttggcagctatactcatagcatcagcctcccctttcgcacctactacaaatgcatctttaaaagaccccatagcttttgctactgctacagaagtcatatgtctatcatctccagctagtctttcaacattcttagttactgattctaattgctttttagctgtatttgatactgctgattctccacctactatatatattttagctgatgggcttttcttaattatatcttttatataatctaaagttacttttggtatttcattatcggatgctaataatataggtgcttttttagattgagcaagtggtgtagctgctaatccatcaactagtttatttgaattaactataactatattgtcagtatattttgtttgttttgctatagccactgcagttgcatatctatcatctccagctatcaatttaacctttgaattaccttctaatgcagctttggcatcttttaaatctttttcattagtactttctacagtaagctctattgcttttccagatgcatcagtatacttaatagtaaatttatactttcctgtttctgaatcttttgatgaaatatcactaattgactttgatgttccatttgctaccatattacctttaacagttaatctatatccatcatataaatcttgtggtgaaactgtatttaggtcactattttttatagttatttcagctaattggacatcatcaatatttttagctcctgctacacctagtttaacgattttatttactctaaatccttctgtagaagggtctaagtttgttcccgttgaatcaactggatttgctgttaaatcaattttttcatcaccaatacctatctctatagttttagaagttactgtgtctgttttatctcttaaagttataactaacttatctttagcactatcatatgaagcttttacatctgcaactttataaattccattagtttcagttttagctttttctgttatagaattagcctcagcggaaaggtctgctgaattttcatatttttcagttgcttctgcaactacttcatttgcactatttgttatatgccctttatctgttatagttacaataagttctttattttctcccaaagcatttactaatttctctaattcatctatattagttattatttttaattttgataaagtctcgccaacttttatttcatatattggttgtccaacttgagaaccaccagtatacttttgagacattaaatctctaactttcgaaactagttctgtagcttctttcttagttattgtttctttttttacctgtgtagtttctgcagcaaaaactggagctactgatgtacttatcattgcagcagccataattacagaaagattttttttattcatggtattttccccctaaaaaattcaaatttttattattttttccttatttaccaattataatatatatttgatattatttcaataaatgagacttattgtaataattaaccaaaagatataaactttttcttatattttatttttttaatatttatgtatacaaaaaagtaacaaaattgtaattttttttaataatccagtttataactaatagacttttcatcttctttatagtataatattaaatggaagaaagaaatttcaagcatctcttttttccgtatttctcacacagaaaaagaagctgattttcagcttctttttcatttgtattccttaattatttaattgtaattacaatataaagaatcaaaatattttatttttcatttaataaaaattacatgaacttttttagttaaatttatataagtattgtactgttgcttcccttatatttttatttaaagcttcaaacatatcatatccttctaaagcatattctttaaacggatctttttgagcataagatttaagacctatatactgtcttaactgttccatagcatctatatgatctatccagtattgatcaaccacttttaaaagtactgttttttctaactccgcaactttatcaataccaatcatcatctttttcaagtcataaaccctttttgaaatttcatatgtgctatcaattatctcttggacactttttttatctacaccgggtattagtaatgtatctgcaggcataaatgtactatataaatgtttaaaatatccataataatctctttttcttccaattaaataagtttctcctgcttcttgtatgatgtctttaaccattttttgaatatcttcttttatatcttcatcatttaacactttatttctttcattatatataacctttctttgctcattaatagtatcatcatatttaagaacattttttcttatttcaaaattcttaccttctacacctttttgtgctctttctatagcccttgtaagtgctttactttcaatagccgtattttcctttgaacttgttctcttcataagtttctctatagtttttccaccataaagctttattacatcatcttcaagacttacaaaaaatcttgatgtacctgggtctccttgacgaccagaacgccctctaagctgattgtcaattcttcttgattcgtgtctttctgttcctataacataaagaccacctaaatttttaactttttcttcttcttctttatctcctgcacctagagaaatatccgtacctctacctgccatatttgtagcaatcgttatagcatctaatttaccagctttagaaattacctctgcctctttatcatgttgtttagcatttaagacttgatgcttaataccttgcttcttaagcattttagataacttctcagatttttcaacagaaactgttcccacgagtattggctgtctagtcttatgtatccttattatttcttctacaacagcactatacttttcttcttctgttttaaataccttatcatgcaaatcagctctaataactggtctattagttggtatttggacaacatttaatttatagattgactcaaattccccttcttctgtctttgcagtaccagtcataccagaaagtttttcatatagtctgaagaaattttgataagtcacagtagccatagttttagattcattctttatctcaacaccttctttggcttctatagcttggtgaagtccatctgtatatcttctaccatccattactcttcctgtaaattcgtcaactatcattacttctccatttgagataacatagtcaacatctttttccataagcttatgacctcttaaagcttgatttatatgatgatataattctatattctttatatcagtaaggtttgttataccaaaaaatgactcagctttgcttataccacttgctgttaatgctatagttttatcttttctatccatctcaaagtcttcttctttaacagtttttacaaagttatttgctaactcataaagttttaaatcttcatcaccatctcctgcaataataagtggagttctagcttcatctattaatattgagtctatctcatctactatggcaaagtttagttccctttgtactttatgagacaaatctggcaccatattatctcttaaatagtcaaatccaaattcactatttgttccataagttatatcacatttatattgttcttttcttatacttgggtcttggttagataaaattacacctacagtcaatcctaaaaattcatatactggacgcataagttctttatcacgttctgccaaataatcatttactgtaattacatgtacaccttttcctgttaaagcatttagatatactggagctacctcaactaaagttttcccctcaccagtcttcatctcagctatctttccttgatgaattactatacctccaattaactgaactttatattgacgcattcctaaaactctttttgagacctctctaacaacagcaaatgcttctggaagtatatcatccaaactttcacctttgtctaatctaagtctaaaagtatttgtcatttcttttaattgttcattctctttgatttccatatctttttctaaagattctattttatctactattaaatttaattttttaatttcttgttcatccgctttatctaagattgcatctaaaactgacatattttttgacctcctcttttatcatacaattattattataccttaaaattatagaatagtagacaattattttattgtatagtataataatcatacttaaataaattacatctttatatatttaagtatttctcacataaaaaagagactaaatttagtctctttttttgtattcgaaaacataatataaaaagacttctcatataagaagcctttttatattattatatttatattacatacttaataaatcttttaatttatttataactgaagtagctatacctttaccaacttgaactaagttttctccattatctttatcaagaactttacttatagatacactttgatctgaagataaagaatcagtagctaatactataggtgctggagatactaatttatttttatcattatcagaaccagttaatactttaccatctttatctactggcttaccatcagaattaagagttacaccaaagtttgctgcaactggagctgctgctaaagcatcaactaattgatcttctttagtagaaccatctttagctacaaagaaattaactacttttttatcattatttaagttatcttgataataagaagattcttttataacttttgcattagttgcttgtctatcatctccactatatctatctggagatttacctgtagcatcatctattgcattttcaacatctttagatacactgttttctccacctattatatcaacttgtgaatcatctaagaaatcttttacatcatcatttatagttttagcttttccatctacaactactattggtgtagcatcaccatcagctaaatccattttaccattagcatttcttaattgagatgcaactggagctatactcatggcatctgctaatcctgttcctccaactacaaatgctttatcattatcaagacctacttcatcagctatttttagagaagtttcatatctatcatctcctgctaatcttgtaactttaagtcccatatcttttaattcattttctacttctttagatatagaattaactccaccagctaaataaactttctttgaagtatttatacctgttgtactctttatattcataactctctttatttcagcttttacgcttgaatctaatttatcttttgaagttaataataaaggagctttcttttcagaagctaaaggagaagctacaagtccatcaactattgcatttcctccaaccaatactacattatcaactgaatctctaaatatagcattttcatcatcagagttataatatttttgacttaatgctattgcagtttctattctatcttctcctgctacttctatagcatttgaatatccattattatatgttcttaaatcatccacataatcttttaagtctttcttcttatctgacttaagagttaatttaactggtgaattttcatcagcaattgaagcctttgcagcactcttagttgtaactctttttccttctggataaagaaccacttgatattttccactaacttcttctactaatctattagtatctgcttcatccccatttaatactctgtaaagagtatttaaatctgttttattaaatacatattttttagctaaatcttgtgctgttttactagaactagcatcaatatctattgtctcttcttttgcattcaatattctaagtttagttattactgggcttccagattgtgttgttggtttagcaaactcaatagtcgcagcttgatcatttgcacttgcaggtgttattattaattctttggctaaatttatagtatcactatctcctaatttaacaattttttctgtttttccatctgcaaattgaagacctgttgaataagtagttccatcaactaaaccaaactttttagttttcatagcatcttttatagtaagtttcacagcagtttcagttgaatctgtaaaagctgtatcaaatacatctgacatagacataactgcagcactacttggagctgtattttttgctcccggagtaccagcattttcgacttcaccaataatactacttgtagctacttttattgcactagttccacctgttaaattttttaatgcaacaagtttacttgtagttactttatctccctctgctggagagcttattaagaaatctacataatccccatcacctaaattgtctaatttattatctacttgtgtaaacaataatttacttgcatcttctgcactaagctcagctcctacttttatagtagatgctaaagttccctcaaagaaaattttaatctctgttatacttccatctaataaccctttttgtaattgttcaactgctttcttatacttgctctgtactactgtatatccttgatcaccagtctcaactttcgacatatcttctgctgcaaacacaggtgctgcagaagctaatactgttaatcctgacatagctattgctatattcttcttattcatttcttaaattcctcccaacattatattaaaattacatctcttcattatgtacatagaataatcatccatatattcctaatatttctcacatctctataataatccatttttattctttttgcaagtcatttttttgaaattattatttttcccaagcatatgagtttttatacccttaaactccaatatttaataacttaaaaaatttgattttacttatttaaattacttatttaaaaattcttgtgtagcatacacttctccattaggcaatatatataatccaaacccagtatatacaaaatcactatttaacatattttcattatatttatctgactttttccaaactgtaaatattacatttgctacttctctagcatcctttgttgtataagtactttttgtaacaagtggtacaaaagctatattttcttcacttctcaagccatatccagtaaatacttcaacagatttcttaccatttattacatgtgaaaactgacctttatctgccatgtacttagaccaggaattagaaagtccttctaagtttttagaaacttgtaatggctctttacctttttcttttctatatgaatttaccaaactatacatttcactagaaaccattcttttaaactcactactattcatatcattagtcttatattcaagtacatttacttctacacttattgatgtagtctttccaccaatatcagtagcttttatagtaactttgtatttacccaccttatcagtatcaatatttcctataagctctggtgtcaaatcgttaccattgctatcctttgctacgatattcagtttacttatatcaaacttatcaccttgataaatatttaaatttccaacagttattgttggtgcacttgcatccagtgatgatgcacttaaacattgttctagtgtcttttcatctattcctcctagtgctgtaatcttatcagcacttctaagtacagacttatcactatttccgtcaactaatacaataggtgcattttttgctatagaagaaccagcaactgcatctactaattgataacctttagaaagataaaattcttttgccgaactataaaaatgttttataacttttttattagtctcaaatctatcttctccagctaatctaactgcattagtttttttaactaaatcattacttattatctcctctgaaccaagagcataacattgcacaccttcttttttctcaaatggaacatttttaccattagttaaaattataggtgatccatctcttgatgctactgatgacgcactcatagcatctgcttcacctgtataaccattagttataaaaaccttatctataggttttattgaagctatttcttttgctataagataacttgtttcaattctatcattaccacctattcttttaacttctattcctttttgctttaattcattttcaactgattttcctattgaatcttcagttcctattatataaaccttctttacatcttttaacattttttctgtgtctgatggtatactgtttctttgtgataataatataggtgctttaactgttcctgctaatccacttgcacttaatccatcagctagtgtattatctgtatttactaatactacattttcatatgtttgtttctgtgcaattttggcagctgtctcatatctatctttcccttgtatcttttctatgctcgaaagtgcattgatatttggtgctcctgccattattaatgatattgtcaatcctattgataatactctcttatttaccttcatcgaactcctcctactaatttttttatataattcagctaatcataaattacatcctcagtagtgattccctcaaaatctataaactactaaaacaaaaaacacctaaaataccatagcctgtaaagcaataacaaaacagattacaaaaagtactttagatgtgattttcattttataatatcagtaaattaacaaaaaaacaagatttatggaattttttacaaactaccttcattgccatttaaaaactcctgagtagcatgcacttgaccatcagataatatataaagcccaaatccagtactatagaactcatcactaagcatgtttgcattgtactctggagacttcttccacacttcaaatatagcctttgccaagttttttgcatcttgtgtcgtttgaacgttcttagaatctatataaatatatgctatattttcctcacttctcattccaaactcagaaaatacttgtggagcattttttccatctatataatgtgcaaatacttttttatccatcatatacttagaccatgcatttgccataccttctagcctactagatactaccaaaggctctttgcctttttcttttctataggaattgattaagttatacatttcagtagataccatttttttaaattctgggctgttgtaatcataggatttatcatccaacacttttatttctactctttttcctgtactttttccccattcgtctgtagcttttaatgtcaatatgtatgtacctactctatttgtatctataaacccatcaacttctattggtaataccttcccagtgttatctttagccactatgtttaacttgccagtgtcaaacttttcacccttatatatctctgtacttccaactgtaattgttggtggttgtccatttgactttgaagcatttatacactgttgtattaccttctcatttatttcacctacagaagttatattcttagctccttctaatacagttttatcgcttccatcatttactagtaccattggagagtttttagtaagtggtgcagctgctattgcatctactaattggtatccatctgatacatagaatccatctgcactattaaaaaagtagtctattacatttttgttagtttcaaatcggtcagttccttctattcttactgagtttgtatttttaactagagggttactcattatctcctctgaacctatacaatatgattgaatattttttacatcaaaaggcacactctttccatctgtaagtatgattggagctccatctctagtagctactgatgatacactcattgcgtctgcttctccactatatgcgttagttaatagtactttatccactttttttatagttgctatttctttagctattaaatagcttgtttttagtctatcttctccaccaattcttttgacttctatatttttagaatctagttctttttctactgatttacttatagtatcttctgtacctattatatatgcttttttgatattttttagacatctatttgtgtctgctggtatcttattttgttgtgtaaatagtattggagcttttgtagctcccgataatccacttgcacttaatccatctgcaagtgatttttctgtatttactaaaattactgtttcataagtctgtctatcagctatctttgctgctgtttcatatctatctttaccgtatattttttctactactgatgatgcatttacacttttgaagtttactaagattaatgatactgctagacctaatgataatatttttttgttcattttcatatccccctgatgatttttatattttatatttatattgtgattattttctatttattttctctttattttccatatattatagagtatatatgatatgaatatatctcgtctatatattagtgttttattttattaaatttaaaaaattatttttaacttctttttaaacatattcaaaattgaatttatatttatatatataaaagatatctgctttatttaaaattaaacttaatatagctcaaattattatacattttaacctcaatattattaaattgttaagataatgaaaataaaataagaatgcatctaaatatataactttatatctaaatacattcttattttcgatttacttaatatttatttttcaattaaactcttaatcttatctactacagatgaggctattcctccacctacttcaaacaactttgatgaatttttaccttttaatgatgattcttgtgatttatctaacgtatttgtagcaagtataactggtgaattgtttttagctgctaatggtccaactgctaaagcatctataagtttatcttgatttgcaactacaactccatctagtttagattgagagtagaatttatctattactttggcattcgtctcttgtctagtttgacctgccaccctattgtttgatatatctttgtttgctatttttccaacttgttcaatagccttgttagatattttttctattccaccaataaagtatatatttgacaccttatttgatttaataaattgtacagcttcattatctacaccatctttttgtgtaagtactattggagttttttctttaccggccagtgatgctattgataatgaatctgcttctccatttcctgcccctatatacaatttgcttacattattcgtcttatctatttcttttgctatattaatagaagtttgatatcttgtatctccacctattctctgtactgatatttttgaatttacagctttgatagcttcaacaactgaatttggcattgagttgtttccacctatcacaattacttttgatggatttagccttttcaattcttctacagttttttgaggaagcttttcatttgatgataaaagaatcggtgagttttttacactagcaagtggtgtagctgtaagcccatccaccatgcttttatcttctccatttactattacaactgtatctgattttgtccaaccactttgagatattttggtagctgtctcaaatctatcagcaccttttaattttttgactgtgacattagatgtagaattacttgaacttcctcctccagaacttccaccactagacgagccgcctgaattacttccaccaccattatttccaccattgccattatctggtggtaattcatccggttttgataattcattttcaactatgtattctaaactttttggaagtgtaacttcaacatatttatttattgtagcttttcttcccttagttattttttgtgctaatccaagttttaatattacatttgaaccactttcttgtgtttctttactaacaatagaatagtttatcctaatattgtttaataaatattcaagtgcttcacttttctctaccttatacttctcagggtcatttttactagaaccagttccaccaattggttttacttcactctcattaataagggtaaatattaatccttcatcagagtttatattttcataatccactgttttgttgttatatgttacaatttttaaagctggtttatcgcttgttccttttcctaaaactttatagtcagcatttgagttactgccagatttttttacagatattcttcctatattcaatctatttccgtctagtaaatcttcatttgatgtaacatatatatctaatgtagttgtattacttgatttgttgtattctactctacaagtagcatttgcatttccactttttatctgagattttatattatcagaccaagtaatcttttctttctgctcattatctactacttcaacctcaccttgtacttttatactggcttgaaatgaatatactatgttttctactgagtccacagatatatctatagtatttactttctcatacgtttttgttccttgtaaaactggagctgcatatgcacatgtaacactaccagttacagctactgccatagttgatactgctatagttcttataaaagattttcttttactcattaacacccgtccttatctatcattaactaagtggataaatttacttatccacctagcttttatatttaatttataaattaccctaaacttatagttacatttatatactttgcttttaatatctactattttaaaactattctagtacctaatcatattagatatacaatgttagtattagtatttttacgtttttagagttccacctactatttatctctaacaatattaccctttactttattgcttacagttataaccttcttattactgacatcaatagcatttcttgtagcttttctagctttactattactatcagtaagacttattgtctttaactcatcataattcttagctcctacaggtacatacattgtatcacttacaaatctttgacctactggcgtatctccttgaaggtcattgtatctatatagttcagccttaaccttatcacttaaagaatcaaagttttcttttggcatatagtaaacccatgtacctttactgatttcacctaattcacctttttctggaacttctgcaaataaaagtgcttctccagatatagtcttattgtttttatctataagtagtggtaaattaaatgctggatttccactgtattcacctgtaataattattgaacctgctggaatcttacctgtttcatcttcacttgtgctagggtcatcactttgatatacataatcttctgctaactttccaattccattagtacgagtttggtctgcattattcattgtgccaatttctatattatcacctggaggtcctattatatctaattctgcaacttctatattagacttattgtttgagattagttttacatatctagcttggtatgtccaaagtttatcatctttattaaatgtaactctagcttcattatcttggtcttttcctccaccaactaaatcttgtccatattcaaaagttccttgacttacatcttcccagttctttttatcattacttacttgtatcttgtaattagttaaaggattgtatgttgtgctagtattctttctaaagttaaataatccttttaatgagaacttcctagtttctgcctctggttttgtatattttagtcctactataggtaatgtttctttcatgtctactattatatatggattttcttctacatttatatcagggtctttttgagggtctttgttccactctgctttacttattatctttcctttatatgtagtacttacatcattatcttttatattatcaatttcaggattttgtaatggtccatgtgagtcattttcagttctaacatcaccgtcagaaacagtatttgttatgaatgaccatgctgatttatttattttcccttcatctgataattttacagtgccaacttcaaattcttctgttggatttaggtgataatcatatgcaactaccttatatgtaaatgctctgttattaagaggagatatactatcagtaaatttggccttactatttccttttgcatccacaaatccaactgttctgtattttacctgtgttccattttcaccatctaaataatttccatcacttcttattatttcgtatcctagtatcttatctttatccttatctacatctaggtctatagatattttattagatttaactagagaaccactttgtattccatcagaaaaactagcacttactttagtatcttttgccatactagctatattttcatttaaaatctttcttctagcttcgtcatttacatattgtatctttcttgattctttttcatagttcttactatccattatactgtttaattctggtgtaatttctactccccatgccttaaagtaatctcttaaatctttttcaacaacacttgatgccattgctactagcatttggtcttttggtaaactattaattgggtcactacttgaaagtgctctgtattttcttgaaatctttgcatagaatgtatcattacttaaatcagcatctgagttattctttaacattgaacccgtaaaatcatcatcataagctagatgtaattgccataacattccaagcctttcaaatacattgcttggtatacctaagctatttgaagttacatgctcatatatcttatccattgttgaaccttcaagtcttgaatgtgtcttatcatcaaaggtctgagcaagtaaagcaagtacattgttactagtttcgctatatgtcatctttccaatatctgtaacatgtcctatttcatgacctattccccatccaaataagtttcctcctgtagcttttccactatcatctatttggaaaggtactccattcataagccctggaactgaaccatattctactcctacatgtaatccagaagcatacataaatgctccaataaacattctttggtattttatgttcatacgagattttggagccatatcatttttagttaagttaaattcattatcatctacagttccattaccatctaaatcttgtgttttaaatactcctctttctgagtaaactaaatccattatttgttcccatgcaagcatactattatataatctatctacttgtgtatttaaatcagcatttccttttgatattccttgatatacagctgttgcaggaacatttaatgttactttatcactttcaatatctgtagtgtttaacacaccagttttttctgaatattcatatgaattaccaatatttgttcctggataatatggttctccttttacagcatctttatatttagctaattcttctatatatgcttttatctttttcttagattcagaaactcccgcaggactcttatcatttattgttccatttagattaagatgtggtatcttagtagctcctgctacacgtacttttatatctcctccacttggagtatcttcagggtatcttatgtataaacttcctccacattctatatctaaactatgaagtttgcttaattgaattacattttttccagttttaagatttatttctccactcttatatgcaccagattctccatagtactgtgtatatatcaacttaggagtttttccacttttacttccaacatatactgttatttcatctcctgctctagcagctactcctaatgcctgccagtcattttgcatgcctaagttattggaatttacagtatactgtccgtttttatctttatattttcctgatttatttatttcttgatttacagtagttacatcagtaagtgtggctctatcattatataagtcttgagctaattttaattctctatcaataactgtcttatatggatgatattctccactagctttatctggagtatttaatctatcttttaattcagttattttttcttgagttacatcttcttttaattcaacttgtaggtcatccataaatagatttcttacatcatcttctatactgtcatactcataaaacttaagttctgatatattagacttatatgaataagatgaacaaacacttacttgtatcttagtagcagttattggttcttttaatctaaccattacatacttattattatttacagggtctgtctttgtttcaaaaggaacatcccccagattgtgtaattgaccattttcatcccaatatcgtatctcaaagtcatttattgtcttatcagaaacatcaaaacgaggtgtagccataaaagtatccatagtataagatttatcaaaagttattattggtcctctattcgttccctcagctgcattatatgttgggaatgtccaatgtgttgtgaagtctccatctactacattgaatttatcaaatggatttttatcactatattcacttttgtcatatcctgctggataaacaacatctacaatgtgatttgttggtattccaaatccaccattctccttaggagtattaattaatctatagttaggtgttgttggtgcatctatgctttcagttgtacctatatatgttttagacattccactagttcccaagtggttagtagctgtcattctaacttcatatgttgtgttatccttaagaccttctatttttaaacttgtcccacgaataagcttatcattgtattttatccaagacccattagagcctttttctttatagtacaagtcaaagtctttagcttgtttatgatttttccagcttacatcaagagatttaaatttacctttaacatttataccttctggtggttctggttttgtgtctggaacaacttgaaattctaatatgctatctgggctaaattgtataggtttatagtttgagtctacattttctggtactccatctaagttttctggcgttgcatctttataaccactagaccaatctccatttaaagattgtatgctaaccctatatagtccatatgcttctatatctctaacttctattgtatttttactagtttgtaattttttagtagataatacttttcccttactatcaattttatctagtataagttcgtatgctgatacatttacttcattattccaataaaaagatactttttcatttccaacagcagtgctagtcgatattttatttattttaggtatgttcatctctggctttggtatttctttatatacattgtttaaaaattcaacttttgatatttctgcaagatttctatcgtttgctgttgtagctgttatttttatagttatcttttttactgctacttgtttaccaagatttattactatatcgctattttgaacatctgtatatgtttctaatgctgccctactatatgtagatgttgtagagttatcatctttactgatattatccccttcttttggagtatcttcatctgaattaggtttatccattgatgaattttctttatcattatttttatcttgattggtattagagtttacttcttgtttatcgctattttcctgttgtttatcattattttcatctttattatttgaattattatcagtctgatttttattttcatctttattatttacttcttcttgatttacttcttcttgttcgttatttacttcctcttgttgctccttatcttttaagtttttcatatattctttattttcataaggaatctgttgaacattaccatcttcgtcagtaacctcaactattccttttgctggagcagtaccttctggagcttttatattgatgacttccatattaagtgcttctgataaagctatatccattactgctggtttttcctcagatatttcatcattttttgaagatattgtaactccattattttctccactaaataaattttctacattaccattaatatctacatcactatttccttttaattcaaccttacttgtatctactataggattggtagatactatactttctaggctttttgcatcttcactttgtcctaaatttttctgtacataatctaagtcaacaatatctacctttccatctctatttaaatcaaattctcttttatttgaatctatattctctaaaaccttattataatcactcttatctactttaccgtctccatttacatcacccattaagaataattcataatttaaaggtttatttttattatctacacttgctctattgcttaataagactctttgtgaataacttgatatatcaatgtctttaatttctttgttcttaaatccagctccagagacttctatattgtattttccaacaggtaaattattaaatacaatattataatatgatacattctcatctttattttttatttcacttctacttgcagataatttttttatagtatattctatattatctgtcccaatatttactgttcctgaatctttttctccaagctttattattccactattgttactatcatcttttaatcgtaactgcatattagtcatactttctgactcgctattttttattggcagtgaaaaatttaaatctacttcaagattcccccttaacttttctgtaactgatttttcaactgcccttagcttcccctctaatataggttctgcaaaaacatttagtggtgcactacacatagatactgctagtacacaagatattgcctttttcatgaaacaacaatcctcccttaataaatctctaatttttcatgaatttaaatactataagtttcagacaataaaaaaagacactcaaagagaatcttaattataaaataaaaagactttactctttttagcaactggctgatatggctttaaaagctttaatccctatagttttgcgtcattagatttccctaattttgccatttaattttcactactttcttacccattttatactatatttaaactttttaatacaatttttttacattaaattataaaaaaataacatttatattaataaattaatataaatgttattttccattataatttaattatttatatagcttccttacaagcataattttgtgtatattttcttattctttatatcttccataaaattcatgtgtagcatatagattcttatctcctgttatagctataccaaatcccattatttcataccctttatgcaacatattagttccttcttctggatttgtcttccactcattaaaaataaagtttcctatatcatctgcatctctatttgtatatacaggtttatctgaaattttatatttaattatattttcaccttgaactgctatatatccaggtttaatctcactccaatctaagtatttcaaaaaagtagaatatgaattttttccatttatcgtatgagataaagtcttcttatttgccattaaattagaccaatcatttgctagaccctctaatctgcttgctacagataacgctcttactccattatcttttctatactgctttgtaagagcatatactttaccctttattctctctttaaatgctctatcatttggattgtaatataacccttgttgatttggtgaagcttgatttatacattgcttgataacattctgatttatgcctcctagtacagtcaatttgtctgcaccacttaaaatactcttgttactgccattttcaactaaaactacaggagcattttttgctattgtagaggcgaccaaagcgtctgttaattgcaagcctttacttagataaaattctttactatttttataaaactcttgtataactatcttattagtttcaaatctatctgtgccacccaatctaatagaatttgtgctcttaactaattcgtcgctgattatttcactagaaccaagcgcataactctttaagcctgtcgtgtcaaatcccacactatttccatctataagtattataggtactccatctctagcagctactggtgatgcacttatcgcatctgcttctcctgtaaatccattggctataattactttatctattggcttaatttctttgattttttcagctatttttatacttgtatcaaatctattttcaccaaatattctttgtacaaccttctttttggataataactgattctcaacatttttacttattgttgattctgagcctattatatacacagtctttgctttgtttaatctttccatagttgtgtttggaatctgattttgctttgtcattaaaataggcgcatttaaggctccagctaaaccacttgcacttagaccatctgctaagctattatctgagttgattagtattgctgtattgtagttttgcttatctgctatttttgctgctgtctcatatctgtcattcccttttatttgctcaactgatgtcaacgcatttaccataggagtatttaccattactaaaaatagtgtaagtcctatagctaatatctttttactattcttcatattattttctacccccaatgtacttttcatattttttattagtactcatacttatttttaatcaaaagttacaattttgttaccatattttatatatgataccatagttatccatacaactcaaacaatatacctaaagtttttattctctataaattcaaaacattataatttattttatttaattaagttataagttcaaaataatttatgttagtaatatgtttaatcattataagaagtatctttttataataatttttgcaatatgaatttctccacattataatcaaaaaataaaataaggtatctcaatctaattctaaatgagacaccttatttttattattttatcttgttatttgtatattttataatatctacactatgtcttacatattaacgcattgtataatcatatattatctaaataaacttttaatattaattcctatatcttattagttcttagtaaataagtttattttttctgctattttttcaatagcgtttttagctattccttcacctatttgtactaacttagtagcattcttaagtcttaactcaactacttcttcttgtgatttagaaagttcttctgtagttaatactattggagcctttgaactagctgcaagtggtgctgctgtaagtgcatcaactaattgtccatttccacctacataaccatcttttgctacatatgctttagttgcacctgcatagtatttattgattactttagcattagtatcttttctattttctccagctaatctttcaactttattatttaaatctatatcaactaatttgtcttcaacttcttttgatacagaattttctccacccactatttctaattcttttccttttaataatttttcagcatttgcatctaattcgttacctgtaactattattggagcaccaaattgagcagctctagctgatatactcatagcatcagcttctccatttccacctactacaaaagcagtcttaaatgtatcttttaattgttttgctatttctaaagaagtttcaaatctatcttctccagaaactctctcaactttacttacacctaatttagaaagtttttcttcagtttcttttgatactttagattctccacctactatatatattttcttagaagatagattacttccaagtactcttaatatttcagcttctatttctgatggtagtgaatcttttttagataataatattggtgcatttttttgagaggcaagtggtgctgatgctaatccatcaactatagcatcttctccaactaaaattatagcttctgcttctccatctttgaatctctctttactaacttctactgctgttgtaaatcttgaatcaccagataaaacctctacttttaattcttttccatcttttacatcagttaatactttgtgtaagtctctaactaacttatggtttttacttgaaacacttattgtttctgacttttcatttgccttgcttaaaactatatcaaagcttgatttttctggtttatctttatcatcactatcttcttgttcttgagtaaggattgcttcattttcaaatgttaaagcatatccatttttaactttattaactatttctcttcctaatgtagttaatctaattccatcaaataattcttctgctgatatgtcttgtaaatctgcgtttttaactgttatcgtatgtaattcttttgaatctatgtcactataactcttttcataaccttcaaaagtaccttcttctgatgttatcacttttgagaaatctaaatgttggtctcctacatttaatgtaataacatttgctgaatcttttgctctttttacttcaactgtatttgtagattttatagttgctgttaacttgttatcagaatcttctgctaaagttgcattgtaagcattaactgcatctactatttcttgagcagttttgtagttttcaattttatagtcaactacttttccacctaacacttgatgtcctttatcttgaatagtaacttttaaactttgcccttctgttaaagagtttattttattttgtaattgagttgcattagttaagtttacattgtctacttttatatcgtaaactctatcatttacatttgctcctgcttttgtatcttcaaacttaacttctaatgcttttctaacctcttcgattagtttagcagaatctttcgcacttactgtgtaatttttatcaacattttctgtcacagtattgtctgcgaatattggtgctgctgcactcataactgtagcacctgccattactattgccatacttctctttttgttgcttaacatatttatgtcctccgaatattattttttattttttatattcgtatttcccacacataaataatattatatataatattatttttcaatatattttatgtgtttacataatttactaacacaaacactaataatatcttcttgaaccccttccccctacttagctctctataattatgctcaaagatagaaatccctattttatagtgattttctactaaacaatcatatactaacaaaagtattcaaactccatttttatatactactatgcactaatttttgctttgctcttattacttaaatatatatcactaaattaatatctacctccatatattaaaatatataacatattataaaatcatcataaattagagtttaaaattaaaaattattctaatacatgtaattgataaaaaataaaatataagagtagctactttaaaataaatgctcttatatgattagatatttttgcataattaaacgataagaaatcaaatttaattttacataagtagaatatatatttttatataataattgaaaataaaagaggatacctcataatgataaaagaatcactttgagataccctcttacaaacaactaaatcaataattttctatctttcacactcttgatttgcaactgtacaagaagttttacaagctgattgacaagaagtttgacactctccacatccaccttttgcagcactttgctttaaagtagcttgagataaagtttttacatgtttattttccattttcaacgcctccatttctaattgtttcctattgattatatcataaaactactttaatataaactctatttaaagttgacacccaatacgcctccaatgcctcctgctgctgatattagcaataacttataaatcatccctacttcaaatacaaacttttcttgtgctaaaaacacagtcaaaaaaatacatactatgtacaaaagtcctactaaaagtccatacataagtcctttttctttcatgtgttttgaagtgtaaaaccctcctatagctgcagaaatagtagttataaatgatgagaccatagttatattatctccaccaatatctgtaaatgtcaaaaataagttatacactaataaaacagccaaagttattatatatgcatatcctagacctttaaaaatataattagattttcccataaaaaaacctcctctcaaattaatatatattcgagaaaaggcttttaaattactaatttagtcttcttctatttcttcttttttagatttaacagttcctatagcccatttttcaaatggaactttagttctatttggtcctaattctaatattacaacatcatcttcaactttagctacattagctactattccacctattgtaatgaccttgtctcctacacttaggctacttctcatttcttttaattgtttgtcttttttcttttgaggtctaatcattaggaaataaaagattgcgattactactacccatagacctatactcataattatttgttgctgtggcattaatttttcactcctttgtaaattatactcttttgtaaatcataataaatgtttatataacaatttactttctctatctttgagtactattgaatattatatattaaaatgattataattaatagtgcaaaacctatatttcatatccatattttgcaaaaaattcatttctaaaatcaagtaatctatcttccattatcgcttgtcttatttgtttcattaaatttaataaaaagtgaagattatgagtagttattaatcttgcacccagtatttcatttgcttttataaggtgtcttatataagctcttgaatagtttttacaagcataacaatcacattcagggtcaagtggagtaaagtcttcagcataagttgcatttctaactactactttaccttggctagtcattgcagttccatttctagcgatacgagtaggtaggacacaatcaaacatgtctactcctcttataacaccttccactaagtcatctggactaccaactcccattaggtatcttggtttatcctgtggcataagtggagttgtatgctctagcacgtcatacataagtggttttggttctccaacactaagcccaccaatagcatatcctggtaaatcaatactagttatttcttttgctgattgttctcttaagtctttatacatcccaccttgtattataccaaataaagcttgtttgtcggtattattatgggcatctttacatctttttaaccatcttgttgttctttctaaagaattttttacatattctctatctgatgggtatggtgcacactcatcaaacgccatcattatgtctgaacccaatgcattttgtatttccatagctttttctggagttagaaaatgttttgaaccatctaagtgtgacctaaattctacaccttcttcttttatctttcttaaaggccctaagctaaatacttggaaccctccactatctgtaagtattggtttatcccagttcataaacttatgaagaccaccagctctttttataagttcatgacctggtctcatatataaatggtatgtgttactaagtattatttgtgaaccaatctcttttaattcttctggtgtcatagattttacagttgcttgagttccaactggcatgaatattggtgtttcaataatcccatgtggagtgtgtaatcttcctaaccttgcaccactctgcttacaagtctttatcaattcatatcttactgcgtacataaagttctccttaaccatatttatttctcattatttcttaagatatatttgtaataagctattcatataatttattgtctaaatagatttatcttcgtcttctttgttctgttgctccttaattgcttcttcatcatgaatactcattatattaagagcactcttgtcttttgttactaaaaacttttttatagcaaatagtcctgctatagctataactcctattaaaacatctatcataccttcatttttaggcagtagcaacatttttctagctattgcgtaaagtaatgcctcaataaatgctcctggtatatgaagagatagcattactacaagttcaacacctattactaaaagtaatatttgtgctaaaaaatcattaagctgactgtattgtactggattttgaaaatcaactatatatgctccccacataagtcttagaacatctatagttcctaaaaatactgctattagaactactactgctaaaacacgttcaaatataaaagcaatctttaatatagggttattctttttttgtttttgtaaactatgcattcattacctccctactttataatcatagcatctccaaaactgaagaatctatatctttcttttactgcctcattatatgcatttaaaacattatcctttccacaaatagcacttactaacattattagtgtagattctggtaaatgaaaattagtaataagtttatctaaaactttaaatttataacctggatatataaatatttctgtccatccactagtttctttcatctttccatcctcattacaagctgattctatagttctacaactagtagtaccaacacatattacattgtttccattttccttcgctctatttattttgtcagctgcttcttggctaaccatataatattctgaatgcatcttgtgatttaaaacatcttctacttttactggtctaaaagtgcctaaaccaacgtgtagagttacaaaagctatatctacacctttttcttttattttatttaacaattcttctgtaaaatgtaatcctgctgtaggtgctgctgctgaaccattatgctttgaataaacagtctggtatctttctttttcatctagtctagcagtgatatatggaggtagtggcatatttccaagttcatccaatatttcttcaaaaattccatcataaaggaattttataattcttgaaccttcatctgataaatctacaacttctccaattagctttccatttccaaaagaaaatttagtccctacttttgctctttttcctggttttactaaagcctgccaagtatcttcctctgttctttttaataataaaaactctattttacctccagtttcaagcttctctcctattaatctagctggtataactctagtattatttaatactaaacaatctcctggatttaaatattctattatatctctaaatactttatgttcaatattacctgtctctttatctaataccatcaatcttgagctagctctatcttctataggaacttgagctataagttcctgtggtaagtcaaatttaaaatcacttgttttcaatgttaaacttcctctcttaaaatttctccagctacaataatatcaaaaaaacaacttattttccacaatattaccataatctatcaagaaattgctatttttaacagacaccatatccacaatatatagatatttttccacgatatacatgtcttatccacaatatatagatacaatacacacaatttttatcgtgtttatccacagtatctacagatataattaccattttgtggatatatttgaatttttagccattttagaaatattttaatttaatgactcttttattttataaatactcgtataatctatttttatttttcattaggatatggaatttttaagtgttcatatgctaatggcatggctactcttcctctaggacctctatttataaatcctaattgaagcaaatatggctcatatacatcttctattgtatttctatcttctccaatagaagctgccaatgtatctaaacccactggtcctcctctaaatttttctattatagtcataagaagcttctcatctacaaaatcgagacccaaactatcgactcctaaaagttccagagcatcttttgccaccttatcagttatttttccatcagctctgacttgtgcaaaatctctaactctttttagtaatctatttgctatccttggagtccctcttgaacgttttgcaagttctaatgctccattagactgtatctctgcatctaagatgcttgaagacctaagtactatttttgaaagttcatcaactgtataataatccaatttacaaataacaccaaatctatctctaagtggatttgtaagcataccagctcttgtagtagctccaataagtgtaaatttaggaaggtcaagtcttatgcttctagcagatggccctttccctattattatatctaggcaaaaatcctccattgctggatataaaacttcttcaacacttctattgattctatgaatctcatctataaataaaacatcattttcatttaaattcgtaagtatggctgccaaatctccagctctttctattgcgggtcctgacgtaattcttaaatttacccccatctcatttgctattatacttgctagtgtagtttttccaagacctggtggtccatataaaagcacatggtctaactgctcatttctcgatttagctgcttctataaatatactaagttgttctttggatttttcttgacccaaataatcttctaaagtttttggtcttaaactgttttctatatctatatcttccatcttcattgtagaagttattatcctattttcatcttcaaaaccttgcatttatacccctcctctcgtacttttgaaaatctactttatatattttcaaatttacataaactccttaaatattgttttaaaatccaaatattataaaatccaaatactatttcaaggatttactcattatatatgtaagagctttctttataatagcttctgtattcataccatcttttttacatttttgaactgcctcttttgattccgacaaagtatagcctaaagctacaagtgcatctacagactcatcttgtgatatcaaggtaggtttttgtgataataacgttggttcaaactctatgttatttttgtctaccttatccttaagctctaagacgattctttctgctgtctttttaccaacaccaggagctttggataattttccaatgtcttcacttaaaatatatgctcctaactgtgctgatgatgcaaatgatagtattgaaagcgccaccttaggtcctattttagatacagatgttagtaattcaaacatcttaagttcttccctacttacaaaaccacaaagactcatatcatcttctcttacaattaatttagtatatatttttgtggcttctcccacttgtaaattcattattgtattggatgatacatttattttatatcctatcccattattttcaacaactatactgtctatataaatttcttctactgtaccttttatataactatacatacttaccacctatattctttagagttttttcaagtttgtttgaatgagcatggcaaatagccacagctaaagcatctgcaacatcatctggttttggaactttttttagacttaaaaatgaagttaccatctgttgaacttgtgccttatctgctctcccatatccaactacaccttgttttacttgaagtggagtgtattcatatacaggcttcccattatgagcacatgcaagcatagtaacacctctagcttgtgcaactgttatagctgtttttacattcttgttaaagaataattcttccattccaacttcatctatattgtaattctttactattgtatcaattcctttatacacaagttccaatcttctcgatatattcatatgggcaggtgttgtaactgctccataatcgattactttaaacttgctatttttgtattcaattataccatatccaactatggctatacctgggtcaatccccaatattatcattttttaaaattccccctaaaaataaaagaaataccaaaatgtatttctcataaaaacttatgttctaaatcattatatcataaataatattaacaaatcataaaatgctctatgtaaaatataaaatcaaataaaaaagttatatcaaagcaagattttacctcaatataacttttatatttattacaaataaattattgtatttttataggaattaaatgtgactacaattttaatactaatctatttaatattaaattatttattattaacttacttagtatttaacttgaaataatattaatttactattaacttgcaaagtcttctaatcttgaataggcctcttcttcagtatccataactacaccttttttgatttcatcttgaactgttttaggaagtgaatctactcttatttttgttttttctactaatgttttacttccactatcatcatatttatatagtgctatatttccattatcattttcaatagtatatttaccttttatagtagcgttcattgcttgtacatctttattatcactatatttagattctaccaatatgatttcatttttatccatactctttatttttttagttggatattcttttttaaaatatgatactatttctgattttgtcttatctaataatgactctggaactatcccagccattgtaagtgttctcttatagttagtttcattttcgccttcactttgaagccaaacttcacaatttttatttaatccaaaagcttcttttgacttttcgtccatattcgcactagcacttacaactttactagtttgaactccattattttttaatcttgtccctatataaactccgctacttaatacaaatactccaaccagtattaaggcagatattttccaaggaaataattcttttttcttcttttcaaacattgattacgcctcctttttctattattttctccaagctgtaagtttttatacaatttaggtaaattttagaagaaaatatatttatatttcaaattactctaagaatagatattttctaaaaggtagttttctcttaatggttatattcttgtaattatatggacataatttataataaataatcgtttaggaggtaataactttggaaagaataaactgtaatgtaattaactgttcacataacaacagccatatatgttatgcagataaaatttttataaatggtgaaaaagctcacaatgacagacatacttgttgtagttcatttttagatgaatctatttatagtaatttatctagcaacgttaataatagaaattgtgaggaattagtttgtactgtaaaaaattgtaaatacaacaaagatggtagcttatgtacacttgataatatattggttgctcctgaaactgatagagtaaacctttatattgaaacatgttgttctagtttcgaatgtaaatagtcatagtataaatataagggtgtcaaatgtaattaaactaacatagtgtagagtatctacaactattagtttgattatacttgacacccttatttattttaaataaaatttcattattataaccatgtttataatgttctaactgtaattaaatttgataaatttctataaattggtataatcaatatgtaaattgaatttagcaaattaatcataaaaataaaatatcgagtatatagtgttatactaactagaaatgaggtgcttatgagtacattttatattcaatttctttattttgtaatttatagctttataggatggtgttgtgaaactacatattgttcagttttacaaaaacaatttgtaaatagaggttttttaaatggtccattttgccctatatatggatttggagcattagcaatagttgctaccttgactccttttgtacacaatattcctttgttatttttgtttagtataattataactagcataatggagtattgtacgagctttattttagaaaaaatatttaatatgacttggtgggattattctaaacataaatttaatattcatggaagagtttgtctggaaaactcacttatgtttggtgtattatcattgattgtaatgcttatagtacatcctattgtggttgactttattaactctatctctaaaaatgtgctatttatatttgctatatctatagaaatttattttgttttagatttagttatcacagtccatacaattttacaattaaatggtaagttaaaacaaatcaatcttataattaaggaattaaaagataagaaagaatactacaaacttattacacaagaaactatagaaaacaaacttgaatctttagttgaaaatagactggatactttggaagatagatttgaaatacttaaggaaaaagaaaactatcgctatgctaaaaatcgtattgatgagctaaaaaataaacttaatactttgctgtctaaccacaaattacttcatagacgtataatcaaagcattccccaacataagctctaataagcatacagatattttaaataaaatcaaagaaaatattaaatcaattaaaaaagataaataataaaataaacacataagttaaataataaaaatactaatacataagattaaggtttagaatattttttgtaaaatactctaaaccctaattaatatactattatttttaatcttaatttataattttagtttattttacttttaacacagtaaatttaagcgtttaaacttcaatacactaatatactaccccatcaatatctcaactgattctctaagtgtgctaatctctcccacatttccagggaaaattatatatggcatattaggaaatttgctttctttgcctgtcatccatactggtataccaggttttatctgtcccattactgtagctttttttactcttagtgctttagtaccaacatcactagaagtaattccacccttagctataataaaatttggtcttacattaagcataccaattatactggtaactgcatctgatatttctacagaaatcataagctgtttatctttatcattcgtatccaagtcaaaacgctctcgtctagtataaacagcaacagttttaccactgcttattttttcctctacaacttttataactctttttacctcattttttagaccattttcctgaagaactaaatgttgattaaattctataaattctattggatatttacaatttttaagttcttctaactgttgggtagtcttattcacatgtgaaccaacaagtataattcctccattggtattaccttttgatactaactcatccttagtaagcatttccttatcactcactccgccaagtacttttgttatggcagcagcgcttctaaacataaattccttaccactatttactgctcgtataaacgcaattgtaaatacctttacatctacataatcggttgcatttacaataattttattgaatccttcagcttttttaagtttttctgttatagcttcaatatttagctctctaagttctttagaagaaatatatatcatatcactagatttgtactttccatgtgtcttttcttcacaccactcacctatatcagatgatttatatccaaaagatttatcctttgcaaattcagtcattcctgctggtacaagtatttctccttctttaacataatgtacattatctatagtaaacctaccaccttctttaaaaaatggcattattatttcaccctgaaataacttccccgataatctctctacttcgctttttaataaattagtttcaacaggataatgtcctctcatagtagaatcactacgacttatgattataaaatccttattaactttctttgatacatccacaatattctttgaaatttctttatgtgcttttgtagtttgagcaacagtaaatccccttgaattagtaagtataaaaaacatactatttttctcattaaaaccttgttccatactatccttatcccaatcagtataaacagaaatatcatgaactgtttgtacacctgttgggtcatcatctaatacaacaatttttctatctaaatgcttaagctcatctgcaagaagttcatttaatctgtcctcatctacttgtttaaaagtattaagtatatctatgctaattggttttacttctctcatttaaaacgcccctttatgtaatttgtatagtctaaatgtaatttatataatataaacaatagtttgttatttatagacctggaagtggtataattccatttataacactaagcaataaaaccattataaatgctacaactccagcaatggttcctccaattgtccaagagtttaaagtatctttaactgataatccactaaatcttgaaagtacccagaatccagaatcatttggaagggagaaaccaactcctccagcacatatagcaagccctactaaaactggtgacattccagttgccaaaattgtaggtcctaaaattgatgatgttgttactaaggctacagtagcagaaccttgagaaattctaagcaaagcacttaataagaatccaagcactacaactgatatactaagaccagacatagtatcaactaagaagttacctataccacttgcatttataacactgccaaacgcaccacctgaacctgttatcaataatattagccctgctgaatcagcagcttcaataactacatctcccataggtttatttatgtatctctttaaaaatcctattgccaccaatattccaagaagtattgctatgtttttatctcctataaatgcaagtactccactcattgtagaacctttttctaagaacatactaaatacatttgatataagtataagaagtattgggaacaataaagaaaacatagaaattccaaaacctggtactttagaagaatcatcatcttcaatttttatgctatcttttcccttttctaaatttttttctctatcattctcatcaatagcataagctggatatttttcaaaacgttttccataaatccatccacctataagaactgctggaaaagcaacaattatagaataaagtataaaactacctacatttgcatttacatttgctgcaactgctaaaggtcctggtgtaggtattacaagtgcatgacctactatagtcccaactcctaaggcacatacaaaaaccattagagatttcttagttactctcgaaacatacttaattataggcatcattataacaaaagctgcatccataaaaactggaattgaaattaaaaaacctgctgtagttactgctaaagcactgtttttttctccagtcttagctaacaacccctttgcaatagattctgttgctcttgattctgaaagaatatttccaaatattattccaagtccaattacaatacctatactacctaatgtatttccaaatccagtcgatattgtggttgatatttcatttataggcattctaaccataaagcctgtaattatagatgttatcagtaatgccaaaaacggatttactttaaatttaataatcgatacaagtaaaattcctatagatataacaaatgctatcaaaagtccatatcctgtaatcataatctttacccctttatcattctactttattatttatcaattttatttttcttttactatgataacttaacctcgctgtatttatataatctaatcctaataatatgtatttaattatattgatatatttaaatattaattattgtgtttttttatttcaacacctgccaacttttcaaaatactgtgctattccactatggtcatcttccaaatgtccatgtacttttaatgtctgcataatttctaataattgacttgtcataggtagcggtacatctaaattgtgtgctgtttgcattacattcttaatatctttcaaattaatagatatttttccacctggtttaaaatcacgattcataatcattggtatcttcgcatccaatattgtactaccagctaggcctcctcttattgccttatatactttttctgggtctgcacctgcttttgctgcaagtacaaatgcctcagaaactgctgctatcgtcaaattaactattacttggtttgtaagttttgtaacacttccactaccattatctccaattaaaatagatgagcttcccattatattaaaaaatggctctactttcttataaatttcttccttaccaccagccataaaagcaagtgtaccatcaatcgcttttggctcccctccacttactggtgagtctataaattctaagcccatatcttttaatttatttgcacacaatattgattctgtaggagtaactgaactcatatcgactactatacttccttcttttaaagtttttgccaatccatccatcccaaataatatatcctgaacaatagttccatttggaaggattgtaaatacaatatcacattcttgacccatttctaaaacacttgcgtattttgctccacatgatataagttcatccacagcagatttattaatgtcatacaccaaaagattacatccatcttttaataaattttttgccattggctttcccattattcctaatccaataaatcccaatttcattttataaccctccatatcttcacatttttgaaaacgttttttatgttttagagtatactacataccagtataccggtcaatataaaatataaaagtatttattttaacaataaatagtaatttttaaagtcatttattatatttagtcatcctatataagttttaatacatactattgtttttaaatataatatgctacttttacagttttgtatttttactaatttcaattagttttaattaatctgcctttaatgttaatcatacttcacacttcaataattttttatattttttaatcttatctgcaatttaaattgcaaaagattgaccttattttcactatgttgtatgcttaaaattatataagtttttgtatttttatattgtttaggggggtattattaagtatggctacatttaaaagattacaagaacaagcatatgactacttaaaagaattgatactatctggagaaatgatagaaaatgaaatatattctgaaacaaaacttgctagtgaaataggtatctctagaacacctataagagatgctcttcaaagacttagtcaagatggatttatagatataatcccaagcaaaggatttagaatccatcaaattacagcaaatgaaattgtagagatattccaaatacgctctgcaatagaagggttttgtacttttttaattacaagtcaatacaaagaagctagggcagtagaaactataagtaaattaaaacatcttttagataaacaaaaagatattttactaggtgataaaaatttaaactcatttgcagaatacgatacattatttcacacaactatagtttcatatgctcaaaatactgaatttgacaaaatgtttaacaactatatgtacagaataaaaaaattagctctcgattcattatcacatgaaggaaggcttgaaacaacattaaaagaacacacagatatttttaataatattgcaaatggatgtattgaagatgtttacaaaactactctcattcatatggaaactcctaaatacattaatttagaagatttttgtaacaataagtgattttagtattatactttcatttattaaaaatatatctacctcaaattaatttcctaatttataaaaaatattctataattatattgtaactaatactattctaaggagtgatttttttgaacgaaaatgttgtaactaatgaaactattgacaaagattatgctattgaagaagttcgtatggcatgcaaacattttggtgacttatatttttatttttccaaagtgttatttgaagagtttggtgaagataaaactatcgaaatactaagaaaagttttatttgaaaggtctgaagaaagagctattgctatgagagaaagagctcttgaaaatggagatgaattaattgcagacaatattattagcacaactgatgttccatttctaggatgggttcctgaatttaaagagttacattgcccttatggagcttcctggcttttaagatttgaggaaaacccttggtttaaaaaattcgcttctctttactgtgatgttacagatactactgtagctgaagtatttacaggagatacgtcccataaaataacaaaaaacattctatggggagataaaagttgtgaaagaatatatttccatgatgacaaggtatctgaaggtaaatatacttatggaaataaaaactgtaaataaataatttaaattttctatattcatatactatattttgtactttttcatataaatattataactagtcttttattttacttttgtttaacctaaagataatttacttttaatctatatgaattatcatataaataatcagaaagttatctttataaattatagttttagatttataatttataaaatatttatgttctttgtaaaattttttagaagcttctaatgttatgctataaaactatcttgagaagggctgattgaatgtttaataaaatatatgaaaagaaagaatttatagtttttcaagttaaaaaaggttatgtagtttataatactagaaagagttttgaagaaggtcatacacatttaaagcattttgaagcagcaaagacagctattgatttagcaataaataaaaagattcctagaagcaaagatggatattatctgactagtttaattcgcataagtgatgatggttattacattgataagttaagcgaattgttatatgttagagaacaaaaaggtaaaaaagaaaagtactgtaattctggttatcagatgtaacaagactagttgtgaattataagtaccaatcataaatacctttagtcttaaaatcaaagagtatcagtaaatctataaaaaaacaacttactgatactctttttaattatatgattaatatttgaatttgatacaaaattttatacaaaagtttatgttatctattctgattctttgtctgcaaattggctattataaagcttctcataaaatccacccttttccattaattcatcatgattcccctgctctataatacttccattattcataactaaaatcaagtcagcattgcgaattgtagaaagtctatgtgctataacaaaactagttctaccattcataagatttctcattgctttttgaagcataagttccagcctagtatcaacagaactagtagcttcatcaagtatcaatattgaagggtctgatataaaagctctagctatggttaaaagctgtttttcccctagagatatattagatgcttcttcatttaagaacatattgtatccatctggaagagtggttataaagtgatgaacatttgctacttttgctgcttgtataatttcttctttagtagctccaaatctaccatattctatattttcaaaaatggttccattaaataaccatgtatcttgaagcaccataccaaacattgaacgcaaatctttacgtttcatatctcttatatctactccatcaattttaatagcacctttctttacatcataaaacctcatcaataagtttattaatgttgttttacctgctccagtaggtccaacaatagctaccatctgaccactttttacttctgcatttaaatcttctattaaagttgaattttctccatatccaaaattaacatgctcaaatgtaacatttccttttacattttctatcttaactggattttcaacatcaggtatttcctcttcttcgtctaaaatttcaaatacacgttctatagctgcaaaagaagattgtattactgtagataactgagtcatttgtgaaagtggctgatttatctgccatatataacgcacaaatgcttgtaaatttcctactgttatccctccacttactgcatatatagaaccgacaactgccacagctgcaattccaaagtaagttactaatgaaaccataggattcatcatacttgatataaattgtgccttaaatccattttcacaaagttcttgatttacttttttaaattcttttatagaatcttcttctttaccatatagttttatttcattaaatccagtatacatttcttgtacttttccatttaattttccaagagcattttgttgcaatgaaaatctactttgagatttttttactacaaatttagatacaaaataactaattggaattataaaaagagctataagagccatatatatattaattgtaaacatcattgaaagtgccaaaattatgactaagattgagtttacaatttgcataaaactctgttgcaatgcatttgatattgtatctacatcatttgatatacgacttaatacatctccaaaactattactatcaaaataactaataggcaatcttcttattttattttcgacttcatttcttaaatctctcattgtgttttgaatagcattcgtaagtagaaaacttgaagtatacgtaaaaattgcattagcaaaatatatacatgctaaaatcaccaatatttttgttacataatcaaaatttacggaagcccctggtactccttttgcgatactaattacatctttagtcaattgtgttattatcaatccttcagttttaggtgcaagtgcattcatagtagctgctgaaattatacatataatagctataataaaggaaaatttatatttctttacaaatggaagaagtctaccaattgttttcttaaaacctttagactttttcattattctaattcctccttttttaactgagatgttgcaatttcatagtatatttcacagttttttaataattctttatgagttcccattccgacaacttgtccttcattgagtactataatcttatcagcatcaataatagaactaattctctgggcaacaatcaatacaattgcatcttttgtttccttcttcaatttagcacgaagtattgcatccgttttaaagtcaagtgcagaaaaactatcatcaaaaatgtatatttcaggtcttcttataatagcccttgcaatagaaagtctttgtttttgacctcctgatacatttgctccaccttcactaatcaattcatcaaactttctaggtttttttgatataaactcatatgcttgtgcaactcttgcggaatattctaattctgactctcctgccttatgtttcccaaatctaatattatttgctatgctaccagtaaaaagcagtgatttttgaggtatgaatcctatcttttttcttaaagcttttaaatcatattctcttatatctactccatttatcttaatgctaccctctgttacatcgtaaaatctaggtatcaagttaattagagtacttttcccactaccagtacttcctataaaagcgactgtttcacctgtttttgcagtaaatgaaatatccttaagtacagaagcttctccatctggataggtaaaagttacattatcaaattctatgatacccttattttcagtatccttaattccattttcaggattttttatcaatggttcttcatttaaaagttcttttattctatttgcagatacctctgctcttggatacataataaataccattgaaaaaagcataattgaaaacatggcatggaaaagatattccaaaaatgcaaccaactgtccaacttgaagctctccaatatttatcttctcacttgaaatccaaaatacagccaaaacagctatatttaatagtaaaaagaatgctggttgagtaattgacataagcttaaatagtttcttagaaacattagcataatatgtatttgttttttcaaatcgctctgtttcataatcatcatttccaaaagctctaattactcttattccagttaaattttctctcgatataaggtttaatttatctagtcctttttgttgttttgaagatattgcctgagatacttttgctattattgctactccaataattataaaaggtactgatatagccaatactatagaaagttccacacttgttctaattgtcattattatacttatgatgaacataactggagttaataaggcagtccttagtagtatattaacaaattgttgaatttgaaatgcatcattcgttgttcttgtaatcattgaagaaattccaaatttattgtattcagtatgtgaaaattcttgtgatttctcaaatatgtcatttcttatatctctggttacacttgttgataccttagcagaacaataacccaacaatatactacctacaacccctataatagaaataataacaatcactattcccatttgttttatgtaagctatattctgatttgcaataccattgtcaattattttagctattatagttggaatccccaactcgactaatgcaaaactaaatatagccagtatgtttaatactattaataacttataattctttaaataacttaaaattaatttcatatttttctcctttcttaatttttgagatagtgtaatcatgtaataatactaaatttataaatgcttaattttataaaaaaaggagaaaagagttaacgcactctcttctccagcatattctttttaatacaccctccgacaagtcgcttatatgttaacatatttgacaagtaatgtcaattcatatagctaaaagtcttttaaatgcttcatctcataacattgtaacaaattggcatgtaatttatttttgttttttactgtattccaattttacaagttctccaatattactaactttcttaaaattcaaattagtcttatctataccagacttaaatagtgaaatccctctccccaatattattggcaatatatatatataataatcatcaattaagttatctttcataaataattttactatatcgcctccaccaactatccaaatatcttttttatccttcttttttccaatttgctcaattaattttttaggttctaaattagtatactttacattctccagttgtcccattaattgtatttgagtatatatagcattccttacccttatagtaccattcatttgggcttaattcatttgcaatctgtacatatgtggaatttcccataatgatagtatcaattgtatcgtaaaaagtattataatcatcttcctgctcattcttaaattctgaagatatctcgtctaaaaaacttacactgccattctcttcagctatataaccatctaaacttgtggcaatataaagtactacttttctcatgtttactacctccaacatttatagtgtgattattctatgtaaacatcacttttttactcattcaataataccctattaataaatcctcaaactaatttaaataaactttgcataaaactaaaaatatattatataaataatttaaaatcacactaacttattgaaaattctaattattacaaataaatattgctctctgttaacgctagttttataatataattataagctattaatattataaagccgatattactaatataataattatagttaatttacttttgttgaaaggtggtaaataacatgaaaatttcagaagtcgctactccaaattttttgctagatttagaccagttagaaaagaatatagataaaattcaacaaatttgtacaaataataataaacaactttggcctatgcttaagacacataaaagtacttacatagcgagacttcaaaaaaatgcaggtgctagtggttttctagttggaacacttgatgaaggtgaagctctgataaaagcaggttttgaagatattatgttggcttatccttacatgggagaagtaaatataaatagaattgtgactatggcatcaaaaataaatttaatctgtgctacagataatatagaatgtgctaaggcttatagtgaagctttttctaaatcaaaaatagagtgcaagctacttattattgtagattgtggcttacaccgttttggggttgaaccagaaaaagtggttgaacttgctactgaaatttctaagctagaaaacatcaagattgttggtataagttcgcatccaggtcaagtgtacggttgtagttctccagaaggtgttccagatgtttgtgttcaagaagattcttctatggagaaagcatacaaagctctaactgataatggatttaatatagaaattgtcgcttctggtagtactccaacagttgaagctgaagctgcttctaaaactataactgctgtaagacctggaaactatgtatactatgatgctatacagataggtttaggttgtgctactgaagatatgtgtgctcttactgttgtgtgtactgtaatctcaaaaaatagcagtggatattatttaattgattgtggaagtaagtgccttggacttgataaaggtgcacatggaaatagtagtattgttggttatggtagggtatgtggacatccagaacttactattgattcactttcagaagaagttggaaaaattaaagtaaatggtgaaactgatataaaaattggtgatagaataagaattatacctaatcattcttgttccactgcaaacttgacgagtaatttattaggttttagaggagatacaatagaaaaagtcatagaagtagatattcgtgaaaattcaaaacaaatcatcctttaaaaatatatttattttgatattaacatcatgaaagtatatttttcttaaaattattgttaataactaatgttaatgttggataaataaaaaacataaattctagaaatataaatttaaaaaaagaggctgtctcaaaattggatatgtccctgtcaagtagacagacttaaaaaaggctatctttatgcggaatgagttcgatattcaatcggactcattccattttttaattgtattctttcattattataaaaataaatataatcatttattagactaatcatttcctttggatctgtagtatcaattaaatatattaattcagatttaaaatgactgaaaaaactttctataggagcattatcccagcagttgccccttcgggacatagattgtataataccattatctttaagccttttagagtaagatctacttgtatattgtgaaccttgatctgtatgtaaaatacaatctttagctaaattcatatttattagttgatttactgttttattaactaatttagtatccatttttgtacttatctcatatgccactatttcaccattaaataaatctttggctacattcatgtataagaattttttaccaataggtatgtatgttatatccatacaaattttttctaatggttgattagctctaaattcacgatttaatatattatcatatacctcatatgatttaaacttacgtctatatactttctttctaataatagatttaattcctagttctttcatcaacctatatactttcttatgattaatagggctatcaagtattttatttaaataagtacaaattctttttctaccgtaagttcctctatattttttatgtatttcaattatataatccttaataattctatctttgatacccctatcggaagattttttagaataacttagccatttatagtaaccgcttcttgacacacctatcaacttacacatactagaaatactatacttcctagacataagtttaattgttttaaatttatcgcttactttgacttgtccaatagggtacttaacttttttaaaaattcattctccatgcgtaagtacttcaattcttcttcaacagatttaaattttctattatcattttctagactaatatttttaaatctgcctctagtttcctcattaaatgcagttttacctttatttttataatcttttatccagttttgaacttgtgttttgcttcttatattcagcatctcagcaattttgtatgatgagtatccttcttttatatataaatttacagcttttagtttaagttctttgctatattttttatgttttttagacatagaaaaacccccttagagtatacgctttttagacttattataatagccttttatttaaatgtctactataaggggattatactaaaatagagataagcctctctttcattgttgaaattatgaaaatatacttgatttaataccaaaagagtatctcatgaactaaaaagttcattttgagatactctcttcttttttaattaatatacatattaattactatattagtttattactatatatcaattactattcattaattactattcatcaattcttatatatcatttataattaggttataattttatgttatttacattaatcccataacagtgagtaaaactcttactatcaacatccccactattgcatcaaatataggaactgccaacagtaacattctatacttagtactggcatttgctacaagcactattctggcataatgaccaactagagtacccattaacatacatggcataattaatatggttgcttgtggtgcagtgattagaccttgtgcaaataagtttgcagctgtagctgctcctgctgccttagcaaagaatgctgctatcaaaactacaacagattccccaggtagtccaaaaatacccattactggaccaaaaatatttcctaaaatatcaactaaaccagttaattgtaaaaactgcactattacataacccattatcatggctggtaatatctgttcaacacctatgtaaaaacctttttttgctccccccataaatatctcaacagcagttttcttaggtttactatttacaattgcatttccagtattttgttgactcatactacacagcctccttagccttattctttttatttcttacacctatgattaatctaactagattagcaccaagtattttacagaatatctctataaggattattggacctaatgccaataatgctattggtaaaagtggagcttgagtatttattgtgttcagtataacagctgaaccagcatattgatatgctacaaatatagttctttcatcatctgttatttccccactttcaaataattctttcgtcattattgaggctacatctgaactagtaaatgaagatacaaatgctattcctgctattccaggtataccaagcagaggtctaagtaatggattaaatatctttgatgctgctttcattcctcccatagattcaactacatctataagacctacagcaaaacagacagttggaatcaaagtcagagcaaataagaaaccatcttttgctcccgttcctcctttacccataaagtctacaccatctgcaatagtaccaaatgaacctgtcagattagcaaaatctaatgctttaaggaagccttgactatctttaaatactcctgaaaataatactatcaatacaaataaagataaataccctttccatgttaccttattatctccagctgttacatccatataaaatccccctttatacctcaaatttatctaagtttaaaataactgtagaaattaatttcaccctctcaaacatagaatctactactgcatattctcttgatgtgtggttccattctcctcttacaccaaatgaacagattgtaggaacgtttgcaatagttaaataacttgcatctgaactacctccaagtctcttagcatttaattctccaaatccattttctcttgacacttcatttacaaatgtatgaaatctcataacatcttctgtagtttcaaatggcatcatttcacttataaaattaacttctgtagaagttccttctatgtaagtttctttacatatctctctaacttgttctttaacattctccatttcttctactttttcaaatctaaggtctacttttatactacaatcttctggaatagaattttccactcttccacccttaatcacacttacacttactgtagttccaacatctaaattagtcaatttttgtatgcgtagtatcttattagccatttcttctatagcatttcttccaccttcaaaatcattacctgcatgtgtttctacaccttttacatgtatattacatcctattcttccttttctacctatacataaactattatctactaatccagtttccatattaaaagcacaaagagcaccttttgcttccctcaatataacatctgcaccagttgaatctttatgacctatctcttcatctccagaaaatactatttttattggtctttctttgtatcctattttatttaaagctttaataacgtataaagagattattataccccccttcatatctaaaacacctgggccatatgcttttccttctattattttaaatggattctctccaaatgtacctgtttcaaagacagtatccatgtgtcctgaaaaaattatcggctttttatctatattagaaccaagtgtacctatcaatgtattaccattttccccaacatctactagttcacaatccaaaccttctttttcaaattcaagctttaatctctcagctaacttgtttacactttctttacaatgtgtataactttctatattaacaatctctttccataatgaaactatttcttctctattctcatcaacaaacttagaaatttcatttaaatatgtattcataatcttctcctttattttcaaataaaatgtatttctttcctaaaatctaagtttattttaggaaatcttaaaagactagtccttaattacaaaatagcacaattattcttgccagtcaacatatttttcagtcttttttatattttctgatttttctttcaattatccttttgtaaaataaattgacgcgttttatctactattataaaatgaggttataaattgattgattagttacaatactctcgaaattttaaaggaggttttatgaaatataaaattggttttttgacaacatcttattttatgtcagataagtttaaacaagctcttaaagaattaaatgatacttgtgaaattacatttattgagcttaaaggggagaatccttttaataatttacctaatatatactatgagcaagtagataattttgatggatttgtatgcagtggtatagttccatatagtgaacttataataaatataaaagacataaaagttccattaaattttttaaagcttgatgaaagagatttttataaatacttattcaaattattaaatagccaaaaagatattgactttacaaaatcatttatggattttttaagagaggacaacaattattatgatatatattcattaatagactctaataaatgtccatatacaattaaagattttaatatccctcaacctgtatatgactttaaaaaattaaatgataaattattggaaatacatttagacttattgcgagataataagattaacctttcttttactagaaattacatcattagttgtgaacttaataagcttggatatgattgtatttacatggttccatctacagaatcaatcctgaatacatttaaatctctggtgaatgaaataacattacaaaacttagacaaaaataaatctgcaacttgtatagttacagtaaatagttcagagtacataaatgaagatttgatatttaaaaatgatgagatacaaaatcaaatatataacactatattaaattctctatcaagacatggattctatggagttcaggtcaaaaaaaatgatatgaaaatagagatacacactactaaagaaatattaaacaatatgaccaataactatacagatttttttatttcagaagatttaaaagaaattaaatatagcttaaatataggttggggcattggaaatacaaatattcatgcagagcaaaatgctcgtcaggctaatggtaaatctgcttctttgaatggaaactgtacttttatagtaaatgatactaatgatacaataggccctttatattcaaataaaaattctaataatattgaagatagctcaatagccaataaagttgcttcttttatacctctatctaatacaaatgtatctaaaatcatgtgtatgattaatgatagaaattcaaataatgtgtcagcagaaatattagcagactatatgaacataactcttagaagtgctaatagaatattgagtatcttatataaagcaggaattgcaactattgtaaatacaaaactcgataatcaaagaggaaggccaaaaaaaatatataaagttgatttcttatcttttctaaataagatgcagaaattaaattcttaatatttaattttttaataaaagcaatgtattttctctaattttaaagaatcaaaatgtttaaattttattagaatatacaactttttactttaaaatacctaaaccttttatcagtgaaataaaccataatatatcgtagcttattagaaaaacaaaataatttcatatacaaataataaaatagccactacaatccataatttgcagtggctactttttacactatcacttattacttaatttttaaaaattaattgtattttttaaataatttatacacacctattatcagtaaaacaataaatacaagtatatctataaaaataattattgtaacatgtctggcaatattgtaaataaaaagtatagagaatatttctatagacaacgctacaaaacacataaaattcgttaaataatctgcaatagtatcactataaaaagcatgtatttgtaaccatctccatataaatggacgtaaaaggattctgaatacaacacaaatgacagggtaggcataaataaattttttatctacataattagctacaccattattccattggataggaatttgaggtggcaactttggaaatactgttattgcaatcaacaaacaagcaatagtaataattccccaggtaattttccctccccatatatataagaaacttacagagtcaagtttaaaaacaggtttgtttttattccagtattctggcaactcagttatgtattgctctactttcaaattcaaataacttagctcatcagattctaacattttattacacatagtttttgcattttctaagtctgatattttagtttcgagaactttctcctgtttctctacaacttcaactaaagatactttctgtaatataatattacggatatcatcaatagtaattcctagtgtacgtaaatatgcaatttttttgatgtcctctacattttcatctgaatattctctatagccattacgctcattacgaaggggtttaattaaattctcgttctcataaaaacgaatattagagcgtgtcaatcctgttttttcttcaacttctttaattgtcattttaaacactacctctctattctattaatttacaactataatatagtcttaaatattttcactctataaaattgtatatttagtatatcttaaaatcaagttaattatcttttataaattttcatacaataatatctcctttcaataatatctctttttctatatttaaaactatcttattttctataaaataatgtataaacaaggtttacagtcaagtatttttattatttttttgatttcataaaaaaaagcatagcaaatcatttgctatacttttttactaaattatttattctatatcttatatgaacttattgtttaactactacacaatactagctttaatcatcatattttttgcaaacatactggcttcatatatttcttgttcatctggatgactttgagattcctcatggttatttaattgttggcgaatatgttcgttgtcaggagaaagttttaacatctctttatattttgctttcaatccttctgctatcttaccttgacatatgaatgaacctaatatttcattatcttttgggataattgattctatcttttctattatactagctccataacttccttttttacttgctcccattgttccaaatagtgctatctttttattgtgaatattttcaagcacttgttttgaatttttatcacaaattcccttgtccacccaatagcctaagaatactatatcataattttcatagtcaataccatactgaacctcccatgactaaagtcacagggttcctgcttcatagaattttgcatactaaaatatgtcttactaattctccacaggctatccccgtagttcctacggttcttacataagttatttattttgaattgttattagtcttaatccttcttttaatatatttatacttgcatttatatctctatcgtgagtttcattacaactaggacaaatccattctcttatatttaaatccttaacttcctcgtttttatacccacatttattgcatatttgtgaacttgcaaagaatttacctacctttacaatttgtctaccataccaattagccttgtattctaattgacgaataaattctgaccatgatacatctgaaattaagcgagatagtttacgatttctaatcatattctttacttgtaaatcttctatgcaaataatatcgttctcttttattaatttagtagataatttttgcagaaaatcatttctttgattagctatatgttcttgaagtcttgcaacttttaatcttgctttattcctatttaaactaccgattgtttttctcgataattctctttgtaatttagcaagtttgtttaatgacttcttaagatacttaggattttctataaattctccacaacttgagatacaaaattctttaattcctaaatctaaacctatctgattgttagtattttcaaatgcttcaatatctacatcagtacagcataatgatacataatatctaccacttggttctttagatatagtagcattaagtattctccctttaggtacttgtttatcccttactttaaccataccaagtttaggtaattttatatgttgaccacaatacacgatatttccatttgtaaagttagttttatatgaaaatctattaattttctttgatttaaatttaggaaatcctgctttttctttaaagaattttttatatgcattatctaaatcttttaaggcgttttgtagtgaaaatttgtcaggttccttaagccattttaattctttttttaaattggtcaaatcagaactacactgtttataagtaaaagtttctttatcgtttttataaacttctattcttttagcaagatacttattatatacaaatctacaacatccaaaagttttgttaattaactcttgttgttttttatttggatacattctaaacttataagcttttttcacttctatcacctcacgttaattgttttttgatacactttttaatgattttatcatatttaatatattatataatgctgtggtgaacaatttattaatcacctatcataatattaacaaatgtaattatttaaaacaattatttagaaggttttatatttaattttaaataacatatttaagaaccgtaagtcttaacttttatcatttttgaggttgtcgttcacataagttcgctactacctatgcagttctcttatgaacttcttacactttcatgcaagcacagactatatcttatccttcggcattatccgttaaggtctacccacttccactaccgataacttgtagtgtacttccctcaagaggaatagtcgttgaagtttctcctattcggagtttacctgctgattgcccattttaaagtacttaggatttaaccttataccatctaaccaattttttctactttcgtaactttcacacttaggtttatttcatccttatgttttagtttgattagctttaggggtttccagcaattcaagtagtattggataggttctatcctatctctacatataggtttccctatatgctgactattttagctactaactcatgactaaagtcacaagtgtgcgtagctattttttaatcaactaattcatttacatctttaatgtctttttcttcttgaatttcatcatatatagcataagcaatctttttagtatttccagttaaacttgaatataaaactaaacttttcatgatgtctcctcctctttatctaaatacttatctaaatcaccaaaaatatattaaccttaacaaattatttatttttataaagatattctaatctagtatacatccaaactgagagcgtgtttgtaaagcatctgcacacttcttattacaataacagcactttttaatctcatctactcttccatcttttactttctgtaaccaattactatctgctagtaattgtcttgacatagaaaccatatctactctattatttgaaataatactttctataaaatctgggctagacaattttccaaccccacatactggaagatttgtgtgtttctttacttcatcagctaaatataaaaaacagccttcatctttaaagtaaggatgattattggttggtatagtatcttctaattttgaatgatttgcaagtgttacatgaaaactgtttacacctagggattcaaattttttaacaaaatactcaacttccgaaagtaaaactcctgcatttccataatgaggattttcttgtcttattgcaaatttatagtctattggaatgtccttaacttcatctcggatactactaattatttcgcttgcaaatctacttctattatcacacgttccaccatattcatcatttctattattaaatatacttgatgaaaaacttcctacaagcctatcaccatgaatttgaatcatgtcaaaacctgctttttttgcattcaatgctgttactttaaataaatttataatatttttaatttcttctttgggcatatttgttatgtaatcttttactccgtcattcattattttttttatctcatcatgtgaagtaattcccatcttcatagtatctttaattaaattaacatcataatctgaacaaaatagttgtgctgatacctttgcaccagaattgtgtatttcatctacaattttcttgtatttaatgactccatcttcatccgataggcttatagctaccttatgaaaactaggtctaatagatacatctcctagagtaatcagagctactcctgacttagcaatatcagaaaactttttaattttttcttccaatttaagacccatgcttgtaggtgcaaaagatactctattttttaattccaaatttccaattttaattggttttaataaattacaatacatcctatccttcctccacagctgtttttatatcctttaccacatgtaaattctttaccagttctttatattctgtatctgagaactctttttttatgtggttatcccactttgaaaatatgttttttatatcccctaatacttcctcacccttatctgttactctcaactgaaaagctctactatcattagggttttggattttttctatgtatccatcttgttctaacctagatatagttcttgttgtatgagctttatcaacttcaaattctgtagaaacatcattcaaagaacaattcctatttttattaatataaattaaatagaaatatagaccattcgtaagtttatatggttttaaacatttttcacaataaagtttaaagtttttttgcaagttacaaataatatatgacaaactttcatactgtaaatttttaaaatccatcttaaatttcccttctataattataatatgtttgactatatcaactatattatattaaacaattaatatagtcaagaatattttattctctaaatctatgttttattaattctttaaaaaactattatataaaataatcatgataaaattagaaattggaatttttaatatgcactgtacataaatatattttatataaaagtttatattttcaaacaagtaatttttcgaaaattgtctaaattcagtaaaaatatggtaatatatacataagcaatataaatctataaaaaggagtgttacatatgatatctaataaaatgcaaactttagttgcaaatagttctgttataagagctatgtttgaagaaggaaagaaactttctgatatttatggtgaggaaaatgtttttgattttagtataggaaatccaagtgttgaacctccagagactattaaagcagttataaatgatattttaaatgaagaatctccaaatttagttcatggatatatgaacaactcaggatatgaggatgtaagagatgctattgctgaacatataaataaaaaagatggattaaatcttacaagagaaaatttaattatgacttgtggtgctgctggtggtctaaatattattttaaaaactcttttaaatcctggtgatgaagttattgcttttgcaccgtattttggtgagtataaaaattatacagaaaactatgatggaaaattaatagaagttcctacaaatatagagacttttgaaccagatttagatgctctaaaaaatgctattactccaaaaacaagagctttaataataaacactccaaataatcctactggtgtcatatattctgaagaattattaaaaaatcttggagaattattggattcaaaacaaaaagaatttaatacaagcatatatctaatttctgatgagccatatagagaaataatttatgatggtgccaaagttccttgtgtactaaaatactatagaaattcatttatagggtactcttatagtaaatcattatctctacctggtgaacgtataggatatattgttgctaatgggcaaatggatgattttgatgatgttatgtcttcattaaatgttgcaaatagaatacttggatttgtaaatgctccttctctttttcaaagggttattgcaagaagtttagatgcagaagttgatgtaaatatttataaaaagaattttgaccttctatataatagtttaatcgatatgggatattcttgtgttaaacctaatggtacattctatttgttcccaaaagctccaattgaagatgataaaaaattctgcaatgatgcaaaacaatttaatttattattagtaccaggttcttcttttggttgtccaggtcattttagagtatcatattgtgtatcttatgataaagttaaaagttctttaccagcatttgaaaaattagccaaattatataatttaaaataactaaatcaaagtaattcaaataattaactaccttagtatagaatacttacattctatattaaggtagtttataattttatgtactatattttatacataccatattattccaatatgcttgaatattcttatctatagtactaatataaattacaaggaggtgtttgacttgaaaaaaggttatgtttatataatactgactaccttattttttagttcaatggaaattagtctaaaaactgtcactaatgactttaatcccttacaaataactttatcaagattttttgttggcggtttagtcttactaccttttgctgtaaaaagattaagagctcttagtctttctattacaaaatcagacttaaaatactttgcatttttaggttttatgtgtgtagtagtaagtatgtcattgtatcaactggctgttctaaacacaaaggcatctgtagttgctgttttgttcagttgtaatccagtctttgtaatgcttttagcttacttaattttgaaggaaaaaatatataggcacaatgtaatttcacttatattagaagttcttggaattatagttataataaatccattgcatacaaaactaactcttagtggaatattcttaacattatcttctgctattattttttcaatgtatactgtatttggtaaaagaaaaaccttaaaatttggtggaatagttgtaacttgctttagctttatatttggtagtttggaaatgttgatattggttttactcactaaaattaattttatcgcagatatattaaataaaaataaacttcatatatttgcaaatatccctatttttagtggatataccttacacaatatgcccattatgatttatgtattcgtatttgttacaggtgttggttatgcactttactttatggcaatggaagctacatctactagtcttacatctttagtattcttctttaaaccagtactatctccaatactagcattattaatacttaaagaaattatccctataaacatggttataggaattttattgatagtaattggttcaataatttctattatacctacgataattactcaaatgcataataaacacgttgaagccttgtataaggagtagtaattgataatctatcaagttatacataagacaaaatttattagatttaaacgcaatataaaagagatgctattataatagcatctcttttatatttattttaaatttattaaagctctatttagctaggttttgcaaaaagctataagtttgtggacaagctgattttaacttactatttgtatcttgatttaaatagtaatatgcaaatgcttctgcaaaaaattcttctggatatacacctaagtagtttacattacctaaagaacgaccttctttagcaaatatttgtttgaattgtgctgatttagatatatcatttaatactatatggtctattgcatgtgctgtttcatgtaattctaaatttattgcatcatgccctttacctttgttactaaatcctattctaagagctactgtacttccacctaagcctggaacatcatcccaagtttttccagtaccttcccatcccttaggaactacaccttttaaataagcatattctttttcatctgttaactttccacttaataattttatttttaagttatcttgctttaatacatttaaatactttccatctatattagctaatctatttaccatagcattagcttcgtttttattgtaatttccagttggaaaaactactatttgactaagtgtgtctttattttgttgtatagtagtactatatgcatgtgcacttactggaactgaacttattaagaatattgatattatagctattaataattttttacttggtctcatattattccctcctttgagttaggccgggagtaataaatttcaaaataaaaaagatacccaagagtatctttgtatatacaaaaagaaatttttactcttttcggcaactggctggcatggtttactaaactttagcccctatagctttgcgtgactaggtttccctagttttgcctcatttaattttatatctatattatagcttatatctttttaattgtctatatccctttggaacttttttctaaaaagttattatttttttacataaatcttcaaaaaaaaatatcttctaacaatattttcattattaaatattgttttagaagatattttttaatataacttatattttttataatgttagggtctaatttgtatttttatttcttcttaatacgacaagtcctacaatagctcctataactaaaagtatttctccaataattgtagtactatcccctgtttttggtggtactggtggatttaccaaagtatcatctttagctttattatttttttcttctgacactgatggctttaccacttctggtattggaacaatctgtttaacaggagtttctatcacctcttctgatggtggtactggtggattcaatatctctggtattggaggatttattatatcttctgacggtggtactggtggatttataactatagtatcctctgtatcagatggatttgatggtttccttggtttatctgtgcttggtggcactggtggatttactattggttcatctgtatttggcggtacaggtggatttactggtggattttcttgtcttatgttttctatatttccgatatctactattctaccaatatctttattaccaatttcaaccttaattttatccttcagtttttcatatccacttggagccatcacttctactaaataatatattcctggtttttttacactagattgaattacaccatcttcatcactaactaaatccttaactactatatttccaaatgcatcttctaaattgaacttagcacctgaaagtacatttttatctaaagcatccacttttttagcttcaaaagcataaccttgcttagtagtctctactcccggaggacttgaaccattaatctgagccacattttgtatagtctccccaacttttacatttgtgaagtctgcatcaaatgtaacccagctttgcacaggttccccttcttttatctgtttaaattcgtatttatttactaatcttattgtattttttccatctccagcttcttttttaagttcaagattatcagaatattttatattagatatttttagagatgggtttacttcatccaaaagatttacttgtcctgcatcataaaccccataagttgacatattgattttgtatttaacaatctggttatcactactatttaaaacctttttatcaacttctttttttgcgcttattaatccagaatttttcttaaagtttatctcatcatttttatcaatttcactattatttgcatcaaggacagctctatttatataactatcttcaatactaattacctttaatgtataagctataaaaaactttgattctacttcttctttactgagattaattgtaaatccagttataactttatctacttgcccactttcatttcttttttcttctactttatatgaaatattattggcaattttttctttactccaaggagtccagctcccattcattggaacttctacaactctaaaatcatgcccatcctctcctgaagtagtcaatctcataccttctggtatattatctgttataacaacattacttattggtgatttatcatcatttattgaaatctgatagtttattacttgaccaacttgagtaatatttgttgctcctgaatgtcctttagtaagaagataattatctcctctatcaaatatacttacagtagcatcatcttcttgtatcttcttaccatcagattcaatcctagctacattcttatatttattaccatgttttgcatttttgtcactgattctagccttatacttaacagtatacgatttatctatatttccaaaattaactgaaatagaatttttactctgttcaatattaaaatcactaacttcttttccatcacttgttactacacttacagaaccatttatcaatgtcaatccttcaggaagctcatcatacaaaataatatcttttaactcttcctgcttttcatttacttgtatactgtaatttatatctttatttttaactggcataaatacagtagttgattttcttccttcaacaagctttttaagtgttcctttagcatctggaacatccgttttatctccaggttttatttctacatctatatctccacttccactttctatttttccagtggtttcaatatgtatttttgcattagtatcttcatcaacctttttaacatatgcttccaaacctattttaccttgcattacactttggccattaggtaattctctaaatgtaagtgtatactctccattactttctgttttatcaaagcattcacttgtataatctaaattaactttattgaatacatctggcaccttaaaagttattgaatctcctgcttgtattccttttgatgttggagtataagttaaattaaatgatatttttttcattgattccgtttctattgtattgttattaatttttacaacaaatccatagtcttcattaagttcttcttctaaaactttcaataaattttcatcttctaatagattatcttcctctggagttttttctgtatttttattgtctagtggtttttcatcttctaaagcttgttctgactttttattatctgttgacttatcttcttctggtatttgctctggctttttattatctattgacttttctccttctggagtttgctctggctttttattatctattggcttttctccttctggagtttgctctggctttttattatctgttgacttatcttcttctgaagtctgttctggttttttattatctgttgaattatcttcctctggggtctgttctggttttttattatctgttgccttatctttctctggagtctgttctggttttttattgtcgctttccttctcctctccagttgatgaattagttgaaccactttgaatctgactattctctcctaattctgaagcataagatacagttggatatattgtagacaccaccatacttaaaatcataattaaactaattaataatgcctttttatttcctttcttcatataaattttccccctctaggttatctatagtttataatcttccattaatatcgtatataaattaatttttactaaaaaattatataaaaaaagctatgaaaataaataaatttatattcatagccggttgcaccactgactcagtatatccataaggtgcccaataatagaatatacttcaacatctctataatatttcataaaaacaattaaaattgctttatttatattaaaaatacaattatatacttctattatattatgcctctatactattgtctatcttttttacattttttaccttttatgagattaattaataattaaataaaatccttatctacaacaattacacaattatattcaggatttatctccttaactaattttgttatatcttcttttaagtcatcctctgacatgtctttggaaaattcggaaggattaactactatatcaaatattaaattcttcttgcttccttttccaactattctaaaatcatgcatagattttacaagactatttttcttaagtatttcttcaagttcttttttggctgacataacttctttatcttcaagacatattgggtccatgtgaattactagatatatatctaatttttcagatatttctctctctgcagtatctataatttcatgtatttccattatatctatgttggatggaatttctgcatgtatagatgcaatacatctaccaactccatagttatgaataattaaatcatgtgtacctattatatatttataagataacaatagctctataatagaatttaccatttcttcatccggtgcttctcctaaaagaggatttatagtatcttttacaagagagaaaccagcataaagtatcactaatgatactacgataccaacatatccatctataggaaaattagtaaatctagctacaataaatgatataactacacaacttgaagtaaatacatctcctaaagcatcaagtgaaactgcttttaaggctgaagaatcaattttatttcccacaaatttattaaaacgactcaaccagattttaatcattatagatacaattaaaagtataagtggtattacttcaaattttacaggaattggatttactatcctttctatagatgactttacaaattgaagtccaaccaacatcaccataaatgctactattaatgctgataaatactctattcttccatgaccaaaaggatgttctttgtcagctggcttacttgctaatttaaaacctatcatagttattgctgaagatgccatatcagaaagattattaaatgcatcagccattatagctatactagatgtgaacattcctatgaatacctttatcacaaataaaagtaaattggacaatatacctactacaccagctacataaccatacttatttctaacatctgtattttgaacgttttcgctatctctgataaatgttttgactaggattttggaaaacatgaaacttacctccctgccctttattttattaacaaattttataatctatatctttatttatgataacataatttatatataaaattcttaaaaatcactctacttcagtaaaatattattctatatatctatttagatacaaattttatatttcgtaaagtttttatggcttagtgtctgtttaatagattctatataagtttttacaaagattatttattatgataatatcatttttcccaagtattacttagaatatgatttttttgttttgtctttacatattttaaatttatactatatttatgtttttataaccttatgatacactataactataagattttaaacggaaaggaatgaaataaatcatgttttttatcagtgatatttacacaaaatcacctattaaatttgatactccattgcaaaaagaggtatacaaaatattacaaaagttagatattgactttgaacgtgttgacacagatgaagcaattacaatggaagattgtgttcagattaataaaaaattaaatatgaaaatggtaatataaaacaacattaaacaaacaaaaaccgcaaagttacaatatatagtactttgcggtttcataagaattaatttttactattagagttcatacttctactatttttcattgttctaagtattagctttacaaattcatttgacaataatatagtggatgcaaatagtattatttttatccacatatcaaagtccaaagaaacagaattaaagaaactctggaacacttgtgtaaatattatttgaattatccctgtaactactattatttgcaatgccagtttatttttaaagaaatttggtattgtactatttaaaccaaattctctacaatttaatgcattaaaaagggcactgaacgcaaataaagaaaatataacagtaccttgttcttctgatgtagctcccaatatattaaaagctgattgagtaaatacaattgtaattataagaatagcatttataataatatttacaaacatagacctagctattattccagaatgtctatttattggttttcttttcaatacataatctctaacaggttctaatcctaatgctagggctggaggaccatccattattatatttacccataataattgtattgtagtaaatggcatatccttaccagtaagttgagatattatagcaattataaatgctactatatttacagtaagctgaaactgtataaatctttgaaagttctcatatatacctcttccccattttattccctctactatagtactaaagctatcatcagtcaatattatatctgctgcatttttagatacttctgttcctgaaatacccattgcaattccaacatctgcttgactaagagctggggcatcatttataccatcacctgttacagctacaacttcgccacttttttgaagcgctgaaactattctcatttttgtatctggtttacttcttgcaacaatagatattcctttaatttcttctctcagttctttatctgtcaatacatctatatatgttgcttcaactgcctttttcccatcatttaataatcctaattcatttccaatagccgttgctgtatttatattatctcctgtaagcatttttacatctactcctgcattaaatgctttatcaatggaatctttgaccccttctctcaatgggtccactattcctacaaatccactaaaaactaaattatcttccttcatataacttcttgaatttcctattaaattcaattcaccttctgaagtcattgcaacttctgttttagaattactcatttttttataagcaaatcctaatgttctcatagatttaatttgtaacttcttaatctcatctaaaatacttttttctacttttggagttattggaacaatattttttccttgttgtacataagaacatttttttaataatacttctggagcaccttttgaaagtaatatatctgaatcctcttgacgaattaatgttgacatcttcttttcttctgaactaaatggtatttgtgatatcaaatacgtttgttttctcatttcattatagttcttatcattatgatataaaagtaatgcacactctgttgcacttcctatatatttaaatgaattatcttctttttctatatctgcagttgaatttactatacagttttgttcaaaatagctgttactttgatactctcctccacttatatatttaccatcaacatatgctacctctaccatcattttgttttgtgttaaagtccctgttttgtcggaacatattacagaaacagaacctatagtttcacaggcttctttctttgttactaatgcatttatctttgccatcttttgcattgttatagctaaggtaatatttatcatagttggcaaaccttctggaacagttgcaactattaatgcaatacaaaccatatatgcatttttagcaggttctaatgattgtaagaaagataatatactgcttgtatctaaaattaacataccttttctctgcatctgtataatcataaacatacacaataaagtagctattacgcctgatattcctgctattttagcacccaacttccctaatttaatttgaagtggagtttgctggtcttcatttgataaattctgtgctatcttacccatctctgtcttatcaccagtatgagtgacaaccattatgcccctaccatatgctacaagagtccctccaaataccatattgacttgctttgcaggtattgcatcctgttcgattatttctgttttagaataaactacttccatatctaatacagcatcagcattcttagctacatcatcagattctcctgttagcatatcttctctaagtttcaaatttatagactgtataagtcttccatctgctggtatcatatctccagtttctatatatacaatatctcctggtactaaatcattttttgatattttaattatctttccatttctaagtacttttacttctatattttctgttaattttgacagggcctgagctgcttttttagattttccttcagttattatgcctatagaaattccaataaaaatagcccctaaaatacctaatgcatcatgtaattctcccacaaaagaacttattactgctgctcctatgagaattaatatcataggttctgtcaaactttctcccaactcgtcccaaaatgttctaccttcttttatagtaaattcatttaatccatatctaagcttcctttcttctacttcattatcatcaagtccaatttctggatttgtttttaagtattttaatacttctttggtaggtttattataatacctcataactttatcccccttgttaattatctataaggaattatatgcttatgatagcttgtatattacttttcaaaaaaaataaggtgttgattaatcaacaccttatagtggttatatattattaaattttatgttacaggctttataaattgtgagctatacaaatcaaaatatttaatcttcaaaatacccttctggatataatgggaacttagatataagttcttgtgcctctgctttacattcatctaatacttctttattatcaatattttctgctaccttattcattattcctgctatctgtataacttctttttctttcagacctctttgagatattgatgtaagacctatacgaacaccactagttacaaatggtgattgtgggtcgtcaggtataacatttttattaactgttattcctacatattcaagagctttttcaaattgttttcctgtaagattcttacttcttaagtcaaccattactatatgattatcagtacctccacttacaatactaaaaccatgtgaaatcagttcagaagctagagtctgagcatttactacaacttgctccattatctttttaaatttatctgtacttaaatataatagtgaaaaggcttttgctgcaactgtattaagatgtatagaccctaatgttcctggaaaaacacctttatcgagtttctttgcatgttctgctttacaaagtacaataccacttcttggtccacagaaagtctttgtcgtagatgaagaaacaaaatctgcataaggtacaggactaggtattactttcgctgcgactaatcctgcaacatgtgccatatctaccataaagtaagctcctacttcttttgcaacctttgatattctttcataatctattaatcttggatatgaacttgcccctgcaattataagttttggtctacattcttttgcctttgcttcaagagcatcataatctatacgtccagtatttgggtctaccccataaaattcatatttataaatgtcatgtaaaaaattaactgcgctaccatgtgtcaagtgtccaccttggtcaagacgcatacttaaaacagtgtcatttggttttaatattgatgaatatacacaatagttagctgtagaacctgaatacggttgtacgtttacatgttctgctccaaatacttcttttgcacgttttattgctagggtttcaagtttatctgcttcttcagaacctgcttgaaaacgagcccctggatagccttcttctgttttatttgtaaatacacatccacttaattcaagtacttctgttggtgctgtactttcagaagctatcatctcaatattgtgttcttgtctaaccaactcatcagctacaatcttgtataactctgggtctgaaatttttgttgtttttaacataataatcctcctcttaattaaagaatatattttattagtttaatcttcattgataaatttattataatggtctataaaacgtaagatattcctccaccaggtcctaatggtatgccaatacccatgaatagtaacaatattattatttctattaatgtaaataccactgagtatggaatcatattcgatatgacagtacctatacctatatctttatcatatcttctggcaaaggccaatataactggaaaatacggaaaaagtggacttattggatttgttgaagcatctccaatacgataagctatttgagttaatgctggattaaagtctagtagcataaacatgggaacaaatataggtgctaaaatcgcccattttgcagaagcacttcctacaaataaattgataaatccagatagcaatataaatcctattatcaatccatagctaggtatccccgactctgctagtaattttgctcctgttattgataaaattgttcctaagttactaagattaaataaattaataaactgggatgctataaatgctaggactatatatccacccatatcactcatactactacccatcatagatactaaatctttgtcactttttatcttcttacttacttttccatacactaatcctggagttaaaaatataatagtgattataggaactatacctttcattaaaggtgcattactagatagtatagaaccagtctctggatctttcataaatgcattgtcacctatacataaggcaactatcactactactacaactaacaatgataataaagcgtattttatacccttattttcaagttcactcaattcctgtatatccttatcatttgttgaatcattatattttgtaaaacgaggagctataaatttttcagttacaaatgctcctgcaaaagttaaaactatcgctgatataaaagcaaaataaagattcattgctggattgccttggtaagatgggtccatcatttgagctgctggtattgtaaatccagctaacaatacatctgtagtactaagcataacatttgctgcaaatccccctgcaacacctgcaaaagctgcaaacatacctacaagaggatgtcttccaattcctaaaaacacaagtgctgcaagtggtggtaatattataaatcctacatctgctgctgtatgtgataacatacctgcaaatacgattgctacagttacaagtttttgtggaactttacttataccctttttcattaacacttccataaatccagatttctcagcaacacctgctccaagcattgtaaccagtactaatcctaaaggagcaaatgactggaagtttgtaactatgctacctaaatatgattgaatctgctctttctctagtagatttactacctttacaacttcttttgtagaaggatgtatttcttctactcctaaattagatataactgctgacaatattacaacaattatacatagtaataaaaatatggttactgggtctggaagtttatttcctgctctctctacaacatttagtgccctcatcaataatccactatctttgtttttttcctgtgaattaattttcctcaaactaataccccctcataaactttatctccagaatgctctatcttaaattttattttttaatttatccatataatttataacagactgacatagtacatttgtacctaccaatatagaatttttatcagctttaaatttaggattatgccactgatatatacaatcttgttctttattgcctacccctaaccagtaaaaaaatcctggggccttttccataaatatagaaaaatcttctcctcctgtagaaggtattggatcaactatagcatcttctgaatacaaatcacacacagacttacaagctattgtgtacatctctttactatttataacagctggtaaatcaaataaataatctagctttgcagttgcttgatatccacgagctatctcacaaactatattttctaaattttctgatattttctttcgtacttcattactaaagcttctacatgtacctgtcatatctaccttttctgaaattacattatttgcagtccctccatttatagtacctattgatataacagctgattctaatggacttatgtttctgcttactatggtttgaatacccattataattgcacttgatgctactatagggtctattgttctgtttggtatacctccgtgacctccaaatccatttacttctatcttaatagtgtctactgctgccattaacccacctaacttaacacctatttttccacaaggtatatctggatgattatgaagtccaaatatagcatcaacttttggattttccattactcctcgttccactagcatcttcgcacctttattgacttcttcggctggttgaaatataaactttacatttccatgaagactatctctaatatgagacaatacatatgcacatcctacaaggcaagatgtgtgtatatcatgcccacatgcatgcattataccatcatatctggatttatactcaatatcaacctcttcatatattggcaatgcatcaatatctcctctcagtgctactgtgggaccatcatacttcccttttaataatccaacaactcctgtttccattcctaaatctaatatttctatgtctaaacttactaataaatcttttatagcttttgtagtcctaaattctttaaaacttaattcggggtgcatatgaatatctgtaaaaaaatctaaaatatcttctttatacttttctgagattaaaataagttcatgcatactaacacctctccaaaattttatttttttattttttataatttaactacaaattatataagttaataatctttataaagatattttttataaatttaattttagtttatatttatattttactatattattttaattaaatatattatcatgttttgcaatttatttaactattttgactttttaaattcggattatataaaaaatttctttaaataaaaactattaataggtgactctattcctgactttgtgttgatttttttctacatgtaattgctttatacaccatacagactaaaattaaaagccccatataacctgtatatggatataaaatgtttactaatttaccaaacggtaaaaaaccacctatacaagccaaaatagctattactgttgttaccaatttaaatttaggatgttcatcttcaacaattctattggttacagaccataaaagtggaacagctgttgtatagatacctaatattaatgcaactgaaaaacatacacctacaataggagatatattatctgctaaataaagtgatggtatttctttcatatacaaatttcctatatctgaaatcatagccaaatacataactataccagcagtcataaacactattccacctaataaacctccccaaaaagcatcctttttactttcaatagaagctcccattcctgttaaaaaaacaatcattacaataatatttaatgtattatatattacaccagaaacgattggactttctgatgcttttgtaacttcaatatttttcatagcttctccaaccatagataaaccatcaaaatgcttaaacaagcttattaatccaacagcaattgtaaatactgctatcactggtccaatacgtccaagtatgcttactaatttttctaaacccatagacactgtaattaaagtagcaacagccatcaatactcttcctaagtaaggatttataccatagtattcagttaaagttgagcctgcacctgaaatcattactataagaatcccaaataaaaatattggactaaaccattcgtaaaattttcctaaaatcttcccacaataaaaagtgtaaattcttgttggttctttaagttttaattctctacctctagttataacttcagcaccaagaaatgaaaacaataccattgatattaatgctccaattaaacccatatacccttgtgaggcaaaaaattgtagaatttcttgaccagtagcaaacccagaaccaattgctgttgctagataagcgcctgcaatacagataatatttttcatattcactttgtctgacatattaaattacctccattataaagttaccttcctttaagaaatataaactctcagtgaattaaatgaaaattctgtctttttgaaacagtatttaattcactttttttattttgtatatctttttctttttatttatatatatttttttatataaataggtacagcttttataaggtttaatattattaaatatgtttaaagcgctttaatttttatcataattaaagtatacttattcagacacactcaaacaattatctatattgactttttatttatcaatttcaatttttagtgttcagtttataaacttttggagtcattcctttttctatcttaaagtttttataaaagttatttaggctattatatccaactatttctgcaatctcatttatactttttgtagtattttcaagtaattcaatagatttttctattcttatatgatttagatatgatataaaagttgtatttaaattacttttaaaaatcctagatatattagatggattggttaaaaataatctagcacaatcatttaactttaagtcattgctatagtttagatttatatattccagtatctcatttaataaatcattattggtatattgatatccaataattttttctacagacttagtaaattctttcatatccaatggtttaaggagtatatcttttacatttaatctcaaagctttttgagcatattcaaaatagttaaatgcagttattactacaaagtttatttttttagataaatgagatgttttttctattacttctaacccattgtatattggcatttgaatatctataaaaactatgtctggctctaaaccaatgattttatctactgcttcatcaccagatgttgctttaccaacaatttttattggcatatctttcatttctataaaatgtgttattatttttagaacagcttcttcatcatctattattagtgctcttctcatgagaatacctcccttttagcttaataatataaaaaagtaagatatataaaacaacataaaaacatctaatatatttcttaacatttataaaacttattaatttttcacaagttctatacatactccttataattttcaataggaattttaatcattatgtaagttccttcattatcactcgactttatatccatatcaaaattatttccataagcagatgtgaattttgtatatattaaagacaaaccatgaccattattactacgaatacctgcctttattttgtctatattatttccatctaagatagttccattattatgaatctctataatagcatactgagaatctaatcttgcaattatttcaattcgcttttctgtgtcaatatctctaaatccatgtgtaaatgcattctctacgataggttgaataaagttaaaaggcacagaaaggttatataacttctctggaataagatattttactttaagtgcatctccataacgtaatttctgtaaattcaaataatttttaatgtataatatttcagattctaattctacaaatcttaaatcagacctcattgtatatctaaacattcttgataaatctattattgcactatacaaatcataactaccatcatctagtgctatgcttgccattgaatttaatgtattaaataaaaagtgatgatttattcttaaattagtaaccatatcttgagctacttttaaattcatttcaagttgctctccataatgatatgttcttgctatagtcttctctttttcttgtaaatcctttcttatatcattaaaagagcaaaaatttattatatttttagatatttgtttcaagaggcgttttatacttctagcagctccctctggaatatcatataaattattatgctctgtatctaaatttaaatcagataatagtacataccctcctcttataacacctatgctattgcttttgtacagtattggtatattatatatagttatcccatattcacatacaaattgattgctacttttttgattcatacaatcacaattttgaggaaatttcataggattacatttttcaaaacaaaaaagtggaaaataagggttttttaaaactatattccatgaatcatcatatataattaatggaattttaaacgggtctataaattgaccacgaattgattctactgctgcatacaaatttaatgtactttcactataatttatcaaggtcttctttaaataattattaggattaatatctataacttcactctctcctacatcatctacattatttgaaacaataagttcttttatttctctatcgcctgtatttatagtttcatgtgtgctaccagattctatataaaaaatcataccttgataaaatggcttccaaactccatttataatatacaaaccctctccctctaaaatatatatcatctgctcttgaccataatgaacatgattaaaatgtttcttaccaggcatagttactgcaatgtatatattcatagcttgttttggattattttcatcataagtatgtttccattcaatatatccccactcagtattttgaattttcataaaagattcctttcctgtaaattatttatgttcatattgtgaaaaattagtaaaaaaaatgtgtacatactctttcatatgatagcttactatatcaatattcattagtttgtacacatttttatattaattatttttttttattacttctattattattgtatcacttttatattaactatttttttattacttctatattattgtatcacttttatattaactattttttattacttctatattattgtatcacttttatattaactatttttttattacttctatattattgtatcacttttatattaattattttttattacttctatattattgtattgcttaaaaatacataatttaactcttatttaataacagaaactcccatatatggtcttaaaacttcaggaacaaccacagaaccatcttcttgttgataattttctaatatagctgcaacacttcttccaatagctaacccagagccatttaatgtgtgtacatattcagctttagaatctttatctcttttaaatcttattcctgctcttctagcttggaaatcttcgcagtttgaacaagatgaaatctcaacatacctattgtaacttggcatccaaacttctacatcatatttaaaagaagccgtaaatcctaaatcacctgtacatatctttactactctataaggcagattcaataattgtagcatagtttccgcattgttagtaagcttttctaactcattgtaagattcttctggtgcaactattttaaccatttctactttgttaaactgatgctgtcttactaaacctcttgtatctcttccagcagaaccagcttctgacctaaaacatggagtataagctgtataatttattggtaattgttcaaatttaagtatttcattagcatgtatattagttaaaggaacttctgatgttggaatcataaaatagtccagaccttctattttaaacatatcttcttcaaacttaggtaactgtcctgtacctaaaaaactatttctatttgccataaatggtggaatgacttctgtatatccatttacttttgtattcgtgtctaagtaaaaatttaataatgctctctctaatctagcacccaatcctttgtaaagagtgaatcttgaaccagttattttactcgctgtttcaaaatcaagtatacctaattctgttccaatttcccaatgagccttagattcaaaatcaaaggtagtagtctttccccaagttcttacctcaacattatcttcatcagtttcaccttgtggtacttctggatgtggtacatttggtattctcattaataggtattccatcttatcttctacttctttaagattttggtctattaccttaattttatcagataactcttttagtttaatcttttcattttctacatctttaccttcttttataagatttggtatatttttagatgctgtatttaatttatgtttcataacttcaacttcttgaagaatctttcttctttcatcatctaacttaactacttcatcaaggttaaagtctttttcgccccttctttccattgctttttttatacaatctaaattttctcttattctttttatatcaagcattttttcctcctcagtacctaagattggatttatctcttaatctcaaataacttagataatatactttatgcttgaggttaagaaacctttttctttatccgaacctgttatttttattttatttatattttactcacttttttgtccattgtcaaattatatttaattaaataaatgaaatttaattttaggagaatattgctagatttaacttcattataattatatctattttgctaatcaattatctattttgactttttctttatcaatcttgtatagttattaacttttatataaatttttttatattataacatagtcctatatatctattatttggatagaattattttttaaattagaattattttaatgaatgcttcaagtaataggtatgaaattgaatcttttagaactgcttataaaaaatactcaaagaaaaatagtaattttctcagattcacaatatattttatatgaaatgttataaggtaatctatttaataaatttaaatttgctattatagatttagttccaaagtcttactgcaaagtaatatacatagttttttaataaactaataagtgcaattaataactacttaattgtttaatatagtacatagataactttaataaatcgacagttatttaaaaaggtagaatcaataaaattatacttataaatcttcaatacaataattaaaatttaataaaaaatataattgttgatttaactgtaatcttatttaattctacctaacttattatataaaactattttttatagattataaaatatctaactttcatctacttcaaagaatacaatacttctccttctcttatagtctgcaatactttaatatcttttattttcatagggtcgattgtaagtgggttttcatctaatattatcaaattagctaatttaccttctttaattgaaccttttttatcttcttcaaaatattgatatgctgcatttatagtaacaccctttaaagcatctaatgggcttatcttttcattctctcctatttgtatacctttttttgtaattctatttacagcacaccatactgtttccagcatattaggtgctattactggtgtatcctgatgaagagtgtaaattaatcccttttctatagttgttttaagtgggctaatcttaaacgctctatcttctccaaggtttttgatatgaatatcaccccaataatatgtgtgagctacaaagtatgaaggtatcatatttattactttcatatcatcaatctggtctgctcttactgtttgagcatgtatcataactggtcttatattattttcactactttgctcttttaagtttaaaactttctcaaacgcatctatcaactggtctgctgctgcatctccattacaatgagttaagagttgcatcttttcttttagtgaaatatctataaacttttctacttcttcatctttgtatataggatatccacaataaccatcatctgaattttcatatggtctactcaaccatgctgtcttaccttgtggagaaccatctaagaaaatcttataacctcctactttaaatctatttatatatttttttataaactccctattattatctaatacagacttactttttttcaaatttacatatcctacaacatccatttttaatttattttgatttgccattgcttttaaaatgttaaattgattttcttccattaaaccttcttgagctgttgtaataccatagcttagatatatgttctgtgctttttcaattgaattaaaaatctcatttgatgatggttgttttattttagatgctacattaaaaaatgcattttcttctaaatatccatttggttcttcactgccttctactctacctatatgtccaccttctgggtcacgtgtttcattggtaacaccaagctgttttaaccccaatgtatttgcagctcccatatgaccagaagcatgtgaaattagtattggattttctgaagatgcactatcgagtacactcttatctggatgcttattttcttctaaaaaattattatcatatgaaaatccaattatccagtctcctttttttatattattcgactctttgaaatcctgtattttttttactatgtctttaaaactggttgcatcttctaaaggaactagctttagagtagtagcaaaagctatcaagtgactatgtgaatctataaaagatggcatcaatgtcttaccttgtaaatctataatttctgtatctttatttttcaaagcaaatacttcttcttttgttcctatcttttttattattttatcttttataagaatagcatctccacatattgaatcttccattgtgatgatatttccattgtaataaattttttctttcataaaattctccttacgttgtctactttaataaatttttttcattattttctgcttaattatattatcttctttataaactttttctttagagtttaatcatataaaagttttatttttaattattgtttgccaagaagtaaatactattcattgtaaataagacaaattaataggctttatactaattgaaaaaatattataagttgttaaatttaaatatctaaactcaattatatctgtacaattgtaattttttaaatcatgatgtattattttaaatatacagttacattattattcacaatataagtatcttagttctcaaataacatctcatgtaatctattcaatgcaaaaaatttaaatattttttaggaggttttttatgagcaaggaaaataaaaatgtaagaattgctgttgtccaggcgtcaccagtcataatggatttagaaaaaactgttgaaaaagcattaggattaattaaagaagctggtagaaaaggggcaaatatcgtagttttccctgaagcattcatacctgcatatccaagaggtctttcatttggatttgttgttggaagtagaacaatggaaggtagagaagattggaaaagatactatgataattctgtaccagttcctagtgctacaacagatttattaggaaaagcagcacaagaagcaggagtatatctatcaatgggtataacagaaagagatggtaatgatataaattgtaccctttattgcacaaacttatttttctctccagaaggtaagctaattggtaaacacagaaaacttaaacctacaggaacagaaagatgtatttggggagaaggagatggaagtactcttacagtagttgatactccatatggaaaaatgggttcgttgatttgttgggaaaattatatgccattagctagaacagttctttatgctaagggtgtaaaactttacatagcccctactgcagattcaagagaagagtggcaagcaactatgaagcatattgctttagaaggaagatgttttgtaattggatgcaatcaatatgttgaaaaaaatatgtatccaactgaccttaactactataaggagctagatgcagaaccagaaattatgtgtccaggaggaagttgtatagttgacccttttggaaaatatgtagcaggtcctattttcaataaagaagaaatgctaatagctgatttagacctagaaaaaatagtacttagtagactagattttgattcagaaggtcactattcaagaccagatgtatttgaattaattgttcatgaataatctttttacacaaacatctacataaatttttttacataaaaaaatgagatactcataagtaaatttcaagtatctcatttttgcttaaaacctataatcctaattataaatttattcgcctatattttttctaaatcaactactgttcttccaacatgttttcctgtcattatcgaatctatactatcatttaactcttccaatgatactacatttaccatatcatctaaatcatctaatttccattcatttgataataaatcccatatttttaatcttaagttcattgggcaatccacagaatctataccatataaagtaattccctttaagataaatggatatactgaacttgtaaaatcaactcctcctgcattaccacaagttgttactgctccacaataattagttgtctttattgctgttgctagagtatttcctcctactgtatctattactccagcccatcttggtctaagcagaggtcttcctgagttatcatccacttctgacctatgtataacatctttaacacctaagtttagtaatacttctttttgttcttctaattttcctgttgaaactacaactgaataacctaatttaatcaatattttagttgcaattacagcaactcctccagtaccaccagtgactaatacatctcccatattcttgtctacagaatctataaatttatacacagataaagctgctgtaaaccctgctgtaccataatccattgcttcttttagtgaaagatttttaggaagtttaactacccaactagaaggaactcttatgtattctgaaaaaccaccagaagtattcattcccaagtcataacctgttactaaaacttcttctccaattttaaaatcatcacaactactagattctactataccagatgcatcaattcctggtgtatgaggatactttctcgtaacacccttattaccatttgcagaaagtgcatccttgtaatttagagaagaatattttacttttattagaacttcgccttctggcaatgtatctacttctctttcaactatatttcttctaaaatttccttcttcttctgtaatatatagtgatttaaattttttattcataaatttcctcccaatacatttagttttatgttaaactaattatagtttataaatagttttatgtcaaactaatttaaatagattaaagattggagaataatttatggaagataaatatattgtacatttcataagtaaaacaaaggctagtatgattaaattcattgaaaataaactcagtaaaaatggtttaggtgagttaatacctactcatggaaatattttaactgcactttatgaaaataatggaatacttacaatgaaagaaattgcagctaaaataggaaaagataaatccactgttacagtgttggttaataaacttataaacctaggatatttagaaagacaaaaatgtacaaatgacaaacgtatcacgtatataaagcttacaaaaaaggcactgcttatagaagatacttttaatagcatctcaacacaagttaaagagacagcataccataatattacagaaaatgaaaaacaagaatttcttagaattttaaaaaaaattaatgataattttaaaaatgctgactaaattgagcataattatatctcctattggaataataaataaaaagaatcaaatattgtaaaaatttattatgatagagaggtagaatatgaatttaaaagatagtaaaactaaagaaaatttattaagagcttttgcaggtgagagtcaagctagaaatagatacaatatttctgcatctgtagcaaaaaaagaaggattatatataatagagtctttatttaattacactgctgaccaagaaaaatcacatgcaaaacaattcttttctaaattaaaagaatttgctggtgaaaatataagtatatcaggagcataccctgtagatttatatgacaagacagcacaacaccttaaagctgcacaacataatgagcttcaagagtgggatgatgtatataaaaactttggaaaaacagcacgtgaagaaggatttgaatctatagctaagttatttgaaaatatagctgaaatagaaaaagttcatggtgatagatttggtagatatgctactgatttagaagaaggtactttattcagaagaaatgaagatatacaatggatatgtacacattgtggccatatacatataggtaaagaagctccaaaagcttgtcctgtatgtcttcatccacaaggatatttcttagattttaaaaactcattatttgaataaactaaggcaataattctatttaaacaatttactatatttatatcaagtatttttataaatactgtattatcttaataacaataaaatgaaccattgatattactataagtagaaaatgtagtttaaatacaatttatagtaattcatcatggttcattttattatttactaatccctataacctacttaaatctatctttaacttttacatactcacataaaatcttatctttaaactaaatatttaaataaagtgtattttaagtagattattataatacattatataagataatacactatgataactttatacttatatcatttatttcttttgtcaagtcaatctcaataatcttaactacatctttttcaaactttacttttttataatccagacatcctactacgaatggaactccaaactttctaaacaaataaatctttccactttcattgtatattgatgtaaaattttcttctattatattcactatcaattttaactcttcaaaagttattatagatttaactaaaaacttctctattatgctcaatataagcagttcttttttacctatgctttgctcttttttatataaattttgaaatatttctttggtataattacatataacttctttactgagaataaaatcaatgtcaaattccttattaatatcctttttcataaacatatttgcaatatcatcaagagaagtctcttctttcatagacaatattaactctattctttctagtattttatctcttggaaagaaagtctcttgacctgtaaaagctgatttttttataaaccattcctctggtattatgttttttcttttccatctatataattgaccataagatatattagttttgctcaataaatctttcttagatattaattcttccataacttttctagcccacctttatactgttttttacagtagaattatctgaaactgataaattatcactgtattcaatatttccaacgtcacaattatctactagagatatgcttttgcctcgtatatcttttattgatgcatcttctaattcaatagtatctccctctatcaaattacatttaaactttcctgaaaaaatattaatgattttaattaatgaaaaagcatctttgcttcttcctatttttatattagttgcccctatctctttacaataagaacctcctcctgaataaacatatatattttctccatttaaaagaccatcacattttattactccatatacctttatatcttcacattctatatttgatttatttctcatttcgccatagatttttatatcttgtgcatacatattttcatttacacttaattgtcctcttattgtaacattattacatttaagtttgccatccactttctgttgagcagttataactaagtcatctatttctgcatctccctctatattaagttgaccattcactcttacacgctctgctttaagattgcctcttataatagtttttccgttaacaacaaaattttttatattgatgtcaccttcaaattttgcatctccaaggacttttacttcgttacttttaacatttccttttgatttagaacttcccacgatttttatattttcatactcaccactacttataaagccttctccaagtatttttatagaccctttttccatattattacctcattttaaattttatttttaaacctatttattacttatccttctttaattttattttttcacttatattctttatttcaccaactattgaatcttcatcaatctctatactttcactgtactccaaactttctacataacatcccttgcctattttaatattttttcctcttacaactttgacttcactattttctaagcttatttcatctgcttctataatatttgcaaacaatttactttctgtatactttctaattgataatagacctaaacttattaaatttgaagacactttttcaaagttgatatgctttttttctagcatacgaaattttttgcaataatctccatgccccttttttatatttatactacttgctccaacttcattaaaattagaagttccatttaaactaatattaacttcttcacaattcaaaaatccattacactccaagattccacttaaattgatattttcacaatctatattctcatttgcttttaaatatccttctccatgaataatatccgattttatacttccttctacattaataattccactagtatcaatttcaacagaattaatatttcctgtacatctaagaagtcccgatatctcaacttttgatgccagtatgtttccttctactttacttaaaccagatgtaaaaaattcattacattctgttgtcccaaaaacttttgctgaaccagaagaatcaaatttactacattttacacttccttctattttgcctgttcctgatatattaacattatcaaaaattccacctttacattttccaacaccatcaaatcttagtgaacttaattcttcattcataatgatatcctttctttaccgtattttatctttaaacctaatataacaaaacattgttacgttgtcaagtctgataataatacttaataaagcaactatcatttattttctataaataggcataaaaataatagggaaatgctttatttaaactagaaatctaatttcttagattgtggtttaaataaaatatatccctattactcaatctttatatattcattgtataaacttctaaaatataagtctttaaattctactgtcaatactttttatacactgtttgtgctatcatttcacacctaaaggagtaggctctccgcactattctgtaacctaaaagacactatcttcttctatctattgataaatttttctattacatcagctagtctctccatatcagttggataaacttcacctatgctacctattctaaatgtatctatatcagtcaatttacctggatagataacaaatccattatcttttaaataagtataaaattccataaattcaaactttgcatttttaggatataagaaagttgttattacaggtgattgagcattatcattcaccaaagtatcaaatcctaaagattttaatcttgaagctattgtaaactgattttctttatatctagcatatcttttttcaacagaaccttcttcttccaattctaataaagcttgataaaaagctcttacaacatgtgtaggtgaagtaaatctccatttaccattatttttctccatagtctcccattgcgcatacacatcaagagataatgatttagctatacctttacatttagataatttctctttattagctattataaaaccaaatccaggtactccttgtatacatttgttagaactactaactaaaaaatctatattaaaatcttcaacatcaatctcaattcccccaaaactactcatagcatcaactatataaattttgttatattcttttgcaagtttccctacctcttgtataggatttaatctacctgtagtagtttcacagtgaaccattgatatatgtgttatatccttgttttcttttaataaattttctactacatttaaatccactgcttctatatctttaaatgtgcagtcaacaaattctatgttaagataattacatatatctttcattctctttccatatgctccatttgcaattacaagaagtttaccatcttttgaaatagtacttcctattatagcttctactgaaaaagtcccacttccttgcattaatacacttgtgtatttatctgtattttgggttgctagagatactaatcttcttctaacatcttgtactaggttattatattcaacatcccaagtacaccaatcttttaacatagatgctcttactgatttagtagtagatagtggtcctggtgtaagtaatatgtaatcattttctggtacaaaatctgatttaatagtttcattctctatttttattagtatatcttctaactcagccatagtttctattacaaaatgtgcacctgcctctttaaatttctttgaaactatactcatcttagcttttaattcttccttatccatgttctctacttcttcttgtgtaagccctaactcacttgaaccttttattacagcaacactccacattcctgcatttacgccttcttttacatcacttattgtatctcctacttttaccatagaactcataggagacacccctaaagcttcagcatttttatagcacatccaaggatacggtcttccttgagatacttctgatggtgttacaagaaaatcgggtgagtatcctttctttgctgcatttggttcaactatgttcatcatctctcttgtataacccgttgtagaacctatttttaatccattttttctcaacttttcaatagtttcaacaacatgaggaattggagtcgtatactcttctaatgtctcaaataacattggctcaaattcagcataaagttcatttacatcatcttcagttggcactttaccaaacttatctgaccaaagattttttattctatccatttcacacatttctcttatatggtctatttttaattttcccataggttttcttgcttcttccattgttacatctatacctcttcttttaaatatctctataaatacattaagaggtgcaaaacatccataatctactgttgttccagcccaatcgaatactactgcttttattttttctccatatatctttttcatatttatagcctccatagattcattttagaatttttgtgtttttaattgtttttacttttaaagtataactttcatatgttaattatacatcatatttaggttaaatatatattaaatttctgtttttagttgtatttaattgtttttattttatatcatatttccataaaatcctaagttacaatctaaaatttactttctaatcttaatctatgaactgactatattttatgaatttagttgtattaagcatagttgtattatataaaactaagggtttattttgcttctatccatgttatatttatctcatttaacttatccttccattcattcggaggttctacatcacaaataacaaaatctaattcctctaaatctgctatcttatacatactagcaattcctattttagaactatcacataatacaaaactttcctttgaattttttatatattcttttgacaacaatgccttattttggtctatactactaattccaaaactatcaagtataccttcactagatataaaagctttatctacgtataagtttttcatagtgtctattgacattggacatgctgtcctttggtgttttaaatttacttttccaccaataaatataacttctccatcaaacaaaccttgattctcataagaaatcaattttgatagaactggataagagtttgtaataatttttaaattgtttacagatattatataatctacaatctgcaaattggtagtaccttcatctatgataattgactcattgtcatttacaaacttagctgcgtatttagcaatactttgttttttatctaggttagtattgtttctctttatatgttctggttcaatcactccataatttatttttatagcaccaccatataccttttttaatttattttcattttctaattcttccaaatatcttcttattgtttctgatgatacttctaatctttttactaattctttagtatttaccttcccttttgaatctaataatttaagtatttctttttttctatctatcgaatttaaagacattcattttcctcctaaatataatatatttttctcctataatattacaatgatacctaagatttatgaaatcatatttatgtattaaattttttacttaattaaagttattttcaaaagactttgtattatcattaaaaaagtccatcaaatattagtatcagatggactttgtaaaattttattttataaattaatatttaaagtctaactactaatttattttcttgtctccaagaattttactaaattatttacagtagacatatcttttctctctaaatcagttggttgaagctctatccctaatctattttcaatttcaagtaaaacttcaattatagctaatgagtctaaaagttccgtctcaaataaattaaggtctaaatcttctcttatctcatcagtccctaatacatcttcaaatatttctataactgtttcttgcataaattttcctccttaaaattaagctaaataacctgagaatatcagcaatccaaaacacacaatatggaatgtaatgaaaatctgcactctctcgaaccatttatcttttttatgttttttataaaatttagattttcgctgatatatatcagttaacacaagtgccaatccttggtatacaccataagcaacataataccaagttagaccatgccaaaatcccattgttatcatggttatcatctgagccacatgagcagcagtagtccttttcttaaatcttttctttctcattgatgacataacaaatctagaaaaaatataatctccaaaccatcttgaaagacttatatgccatcttgtccagaactctttcatatctttactgataaatggcttgtcaaagtttataggtacttgtattccaaatatgtaccctgtacctatagcaaataaactatatcctgcaaaatcaaagaacaggtataaactatatgcgtacatataacttaaaatatttataaaactcatatctttaggtattcttgatacccaatatgtatttatcaaaaatgctataacaaacttataacctactcccatgacaatattttttattcctggcagtaagtattcttctatatactcttttctagagatgtgtttttccaagtcctgttcaaatcttcttgacctatcaataggtccagaacttaaagttggaaaaaataacataaaataaagcatctttgaaattttaacttcttttatagctccatcataaatttcaataaccatttgtatagttctgaaatttaagtatgatattccaataaatccaattattccaaaagaagtaactggagatattttatttattattattgggagcattgatgcaaacaagaatccccaatatatgtatttatttttagtttttcttcttacatattcatatcctttaactattattacttcaagaataataaatattaccaaatactttagctggacatcaattcctactattaagaatatcataaacaaacttgccaacataccataatactttatattcttgcccattagacctaaaattactgctggtattgatgttaataataatatataaagataaaaataatctccatactgtgaaaaaatcattaaatttcctccataagtttctttctgtctattttaccattgatatttgttggaaactcagagattattgaaatatttcttggaatcatatatgaaggtatatactttccaagttccttttttattatcatcccatttttaatattacttaaatcattcttttcatttaactcaacaataccttttaagtaagcaattttttcgtccttatatactggtaaaactactgcattttttacattatgtacttttctcaaattattttctatatcttctatttcaattctaaatccatttaatttaatctgaaaatcttttcttccacaataatatatatttccatctaaaagatatcccatatctccagttttataagctctccactttacaccatctatttcatcatagaaaaatacttcatcagtcttttctttattattgaagtaacctttagaaactgatggtccaattattataatttcacccttttcattttctttaagttcatttccatcttcatcaagtatttttattttacaatttgacatagggtatccaactggaagacttttttcatcatctatagctttttgagtcatatcatttacacttacaccaacagtagcctcggttggtccatatccattgataattcttgtgtttggaaatctactcataagttctttagtaagattttttgaaagtgcttctcctatgaatatcattgactcaaggttaggaagcattttactattaaactctttttcagttatacatactcctgcaaaagaaggagttgacacccatacagctatatctgagatactaaattgtctaaatagttctttatagtctgctaatacatcttttgatattgaaaataatgtagctccatggataagaccagggtatattgttgtaactgaaaggtcaaaagaatatgctggttggttcattattactttttcacttccatctatgtttagatatgggcttatccaatctgaaaagctatctaaattgtttgaacttatttgaaccccttttggctttcctgtacttcctgaagtaaatagtatatatgcattttcatcatcttttacccagttttctttatctaatgattttccctgatattcatttattatatcatttaatttatccatatcaattacattgatatctccaaaatttctttcatcactaaaattaaatattacttttggttttatctctttagtgacttcaaaaactctatcaattggaaaactaatatcaagaggcacatacgctctacctgattttaaagctcctatcatacatgccattatcatgttttctttatttccataaattactataggagtatcctcttctttgtatacatcctttagaaatactgatatagcatctgaatattcatttaaatctttataagaaagtttatctccattacacattagtgctgttctatctgtatttgaatatttttttattccttcaataattttcatataagaatgctcctttaaaatccgttataaataaatggcaattctttaaatggagtaaatgttagaactcctatcgccaatattataaccatagttaaacaaatactagttaacaaatctttattgttctttaaatattttaaataatctctcacagacatctacccatcctttcgtaccaagatgcattacatcccttaaataatacttatctgaccctttatctttaaggtttagaacttcaaagcctttgctttctgctattttttgtgctttatcgtagtactgatttctttctttttcagaaataccagtcaaattatagaatttatccatacttgggattaatacaacaactggattaatacctaagtcagtacatacatttagcatcagtttataattttcaaactccttagatgttaataaatttacatctttgtctcttcctttgtattgctctataccatctttaaaatgctctttataatagtacttatcaatatttagtggatttttaccaactctttttttagcatcttcaatggctttctttctctcatatgaccaatttattggtctttttctttttgttgctctctttttatctagcttaattaatcgtttataaagaatacccttttctttaagagctatacagtactttcttccttgaaaataaggctctaaaagcaccttttcagctttttcaggaaatgtcttaggttcatatagcttagcatataatgcttctgctttatactcatcacttccccataatagcttacttgatttttttgcatattcaatcttattttgtttagatatttttggattatctaaaaatcgataaaattgtattggtgaaaatctagactgataatggtgacttgtgactccgtctttttccataaaccattgcatagaaattaacaagacaactttcttattatcaatattaggattcatacttcctaatattgcagcatcttgtaatgtctgagtataggctctcccaattgcaaacaccttatttttactcctatttgtattaaaatagtactttggatgttgttttgttgaattactaagttctgatgaccccaaaatcataatatccttttctcttaaaaaatgattatttgctgtaacccctttatcttttatatcacttaaagtatcatccataattggaagtagatttttctccctcaaaagttcatcagttttagaatcaagaaatttgtctaacccaaataaaaatactacgcctattataaaaggtgtaataaagtatatcaattttctcatattttctctcctctaaaaatattcaaatttatgttattattaatcatattagttttgatatgtatattcaactacaaaattgtaataaaatcgtcaaaactttttttgatactgttacaaaattgtaaaaaaaaagaaaaaaacaccaaaaataaatttctttttagcactttttcatacttataatttgacattttaacacttggctaagtatacaccttaccttaacttaaaattaaatttatttaagaatatatattataaattcttatattttctaatataagctatatactatcagctggataaacaatactactttgtcttcttatctcatccataatttccattactattattgaattttcatgagaatttatatttgattctattttattgttatttataagacttataaactctacaagttcataatacattccttctatttctctaggcttttcctctgctttttcttttggaatagatatatcttcttctcttccatctctgtatttaataatagctttttcaaatagattaagcttttcaattattatacttccctcttctccttgtatttcagatggtatataagaatcagctactttagaatactgaattattgcatccatatcatcatattgaaatacagctgaaccttctccatccactccagtttgaagtatatgagaaactgcctttacagtttttggagcaccaaataaattcaccataggatgtatacaatacactcctatatccattaaagctccatttgacaactcttttttaaaggcattttctataattccatttttatatttatcatatcttgaagaatactgacaatagcttccaaaaaatcttcttattttccctattttatacaagttttctttaactgctttaaagtttggaacacatgtaattctcatagcttccataagcaatacattattatctttggctgtttttatcattgatttgacttcttttaaattagatgctaacgacttttcacaaagcacatgttttttgtgttttaaacaagtaatggcttgctttgaatgtaatgcatttggagaagctatatatacagcatctatatccttcgatttagccatttgttctaaatcatcaaaaaaaatacttgctccatgtagagttccaaattctctagctttttctaaatttctagaatatacagcaaccaattcaaaatctttaaccctagatgcagctcttagaaatatatttgctatattgcttgtcccaacaataccaaatcttattttacccatcataaatcactccccattttctacactttattttaattttaataaaaaactttacaacttatagatatattataaaataattttatcaaataaaaaagaaagctaattttaaatgatttcaccattttaacatagctttcttttaactacaatctaaattcaacttatatttttaaagttatctttctactatatctttatttcccctcaaaaattttatagtaagaatttcatccacaaacaatgttactaaaagtatagttacaagaattggccaataaggtattataagactatataaactatcaactatatacacttgaaaatatctaactccaataaatgtcaatatagtccaatatacagaaaactttagacatactattcctctactattgtacttataatctgaataatcccaatagaccttattaaaatatactttcataagtattcctgtaatatattctactactgtcggcactactagacataataaaagcaatgcaaatatattattggggtcaataaatcttgagacctctattataatcgacattgcaattgcatacattggtttaaatggaccatttaaaaatccatcttcttgaaaatgcccttgtttataataactatataagttttcaattatccaacctataaaaccatacaagaaaaaattaaataaaaaatataatagagaacctacattatccatgaatattcctcctagctgtttatacttattttttctcatattcatggatttattctaaatcaaagaaattatatttaatttatttaattaatactttatattatagattgtgacattctttagagttcaaactttttaggtattctctaacttccagtaaattttcaagtatcttatgtgattgtgatttaatttgctcatctggctcttttaaatctggtacatttatacatcttatcccaccattgtatgcagcttcaactcccataggcgaatcctctatgacaatacaattttggggattaacatttatctttttagctgcttttaagaatatctcagggtttggtttagagtttacaacatcatctccacaaactatagcatcaaagtaatcttttaaatttgccttagctaatctctttactgctctttctctctttgttgatgttgcaacagccattttgtatccattttcctttaaaaaagagattagttcattgactcctaatttgataggagctcccttcctctccataaattcaatcatatttttagttttttcgtcatataaatctattattggtacagaactatcgtatatatctgtaagaccttctattattcctttacgatttcttcccataactgatgtataaatttccttagtcatagtatatccatacttttcaaacgtctccatccaaaattcaagagaaattctctctgagtcaaacaaaactccatccatgtcaaaaataattccttctactttttgcatacaattcctccaatattttttgatataattatattacactttttatgattaattttacaaccctcaatttatccaattctaatattgtaaaattgtaattttcaaaagttacgctttggtttactttaatatttgaaccaagcatataggatatccacccacctatactgtcaaatccatcatgctctatatcaagtccaaaatacttattaatatagttgatagattcagttccatcaactaagtaagaacctgctcctattttcttaatatgagtctcttctttgtcaaattcatcttgaatttctccaactatctcttctagtatatcttctattgttaccacaccagatgtaccaccatattcatccacaactatagcaagttgaagtttttcctttcttattctctcaagagctttatctatagttaaattttcagatatatatataatatctctcaatatttcttctagttcaattttattttcatttatcttttgattgtataaatctcttatatgtacaaaacctaatatatcatctttattttttctgcatactggatatcttgtaacaccttcctcttttaaaatagctaatatcttttcttcagaatcactttcatatatacataccatatcagttctaggaaccattatctctctaattttcttttcttcaaattcaaaaatattatcaactaatctttgctctgattcatctataagtccacttttataactttcttctactaatagtcttatttcgtcacctgtatggggttcatcaacctcatcagcttgtgaatatccaaatggtttaagaaataaatcagtacttaagttgaaaaaatatattattggatatgttaacttataaaatcctactaataaaaaagatgtactcaacattattttttctgtattataaagtgctaaagctttaggaaccaactctcctattacaacctccatcattgttataattaaaaaagaaatggaaattgatatagtatatataatactttcactaagattaaatacacttactattggtaaaattaactctttaactgtagattctcccatccaacctaatgcaagtgaacaaagtgttataccaagttgacatgcagaaagataggaatttaagttgtcttttattattttacatctttttgcattattattaccttcagttatcatggtatcaatcctagaactacgaagttttaccatagcaaattcacaagctacaaaaaaagcatttatcaaaacaagcattactataagtgttacttttaataactcccgcataaagtattggttcttataatgtaagaaatctataagaactcaaagttccccccttatatttataaatttaatttataatatatattctatcatatttattaatatatcctactttattacaaataatttttataaactaaataacccctttaatatttatgactgtctatttgataaatattaaaggggttatttagttatcattttttatttctaaaaatcttttctcaaatgatttagttatctatttatccaattttttacataatttaatgattaaaaatattaattttttcactataaagtataaatattttttgtataaatattatctgattattaaaataaatattaatactataaataaaaacgaagcatgatttttatttaaataaatcccaaacttcgtctttacttacttagatatttatttactttctaaatcctattatttttaaaaccttatctttttaatacttcaccacatttattctcagtaatctctccattttctaacgcaatttttccatttacaattacatattcaacaccattggctagtaattgtggctttgaaaaatcaatatcttctgacctagaataactatagttatccatgtcaataactgctatatcagctatcaacccttctttaataatacctctattttttattttaaattgcctagctggtaatgaagtaactcttcttacaatctcttccaatctaacaccagactttctgtacatattgaagaaaattggaaaagctcctcttctttgtagttcaaaccatgacatatccccacccacactaaacaaacaatctgaaccaaccataacaaatggattatcaattattttattatcatgtagtttatctgggaaatcagctctatacattcctcctaaacaaaagataagttcttcgtctccatctaaaagtaaatcgagtaataacttgtcctcatctattcctttttgtgtagctatttcacgtattgatttcttttccatattaatatctttagtgtttagaagtattatactccccctatctccaagtataaatgcttcttttaatataagtgttcttccctcttcatttctaagatcatccattaccccatctatacctaattcaaatagactagatgatattgccataataaattgaattactctttttttcttcatacaatgcccagaacttcttggtactgtgtcaaccattatttcaacaccattatacctagcctttaatatctcatcaaatgcttctatttcaactggacttaagtgagatacttgaaccctagcaccacttttttgcccaacctctatggcttcttttactgcattatatcttcctatgtaatctctaatatgagatgtatatataccatcatgctctttaatctgccttgcaatatcaacaagttcatcaatatcagcatacttacttggtatatatgccaatccagtagatattccaaaagcaccacttttcattccatcatttattatatctgtaatttcatttttttccttttctgtaggaggtctatccttagaacctcccataacactccatcttatagtcccatgccccaacaagaatcccatattgacagaaataccacttttagatataaggtcacaatattctgtaaaattattccaacatttatttttatctataagatactttttttcttcttcaagtaatagaccatttttatacatatattcatatacattttcagaagaatatggtgttatagaatgtccacaattaccatttatagttgttgtaactccttgttttagaaacttttcaaatttaccatctagtattgctactatttcttcatgaacatgagggtcaataaatccaggtgttataacttttccacaacaatcaatctctttatttgtattgctatttatcttagaatctatttttgctattaagttgtctttaattgctatatctccataaaaaccaggattacctgtaccatctattataaatccattttttaagattaaatcatatatcaaaatattccctccttaaaaaccaatttttaaataatcttaatgtaatttttatatttgaaaatcaaattattatatttcatatttgaaaattcactattatttcattgtaattagtcactaagcttatctttatacatagctcttgcaattaatatagtaccaaatacacatataagaactactagagactgtggtattataccttgctttgataatataatagtcaatacagatattacaattgctactagacctaattttttatcttgtaaaaatacttgtccaaaaactgacccaaatagagctggtaaaattaagtttaatttttctactacttcagctggaattttagataatacgcttcctcctaaaattacccctatagttagtatacttatattcactaaaatagatacagctattcctattgtagatattatcgagccttcttctgtacctgattcaacttctgctgccttttgagctgctattgaacatggtagcctcatattagatatattaccagaaagaaaactcatataagttcctgggatacctaagattggtgaataagaaactggttctattatgtaatttggagcactcatactgacaattgccattgtacttgctaataatgctgatattggaggcataataccaaatccaaagctcaaaattattccaggaactaatgctgctataatacctaaagatagtgttagtcttccataccttatcataaaaggtaaatattcttcattgtatatagattttactttactcataaaactccccccttatattactgaagctattatcattccgctaaacattgatattgtaagcccccactctcttaaccattttatatttttcttcttttcaagcatacacaatattaccattatagccattccacttatacatgcaattgttccattatcaaaacgcaacaccctatcagcatttagatatgcaaatgaacccaacattgctcctagagatattattggtataaatgatttcttgccactagatataacattggttatcttatctagtttatgtccaaatagtaatgtgaatattatccatcctaaagaacctaatatcatagtccaaactgcatttgtaaatgcaagttttgtcatttcaggagaacctaaagttatacctaatgcatctgttccaaatccagctgacattgattcaaaaattacagaacctataaatgataatctcatccatgctataggcccacccatagttactataagcgataccattccagcaaatatagtcattgaaggcccaatagctgaaatagcactactcttaacagctgactttatttgtttatctgttattcccattgttttaccaactttgcaagattttatagcaaatataagggattgtaccactactattgatactgctactgtactcgctatccacaaaagtggatgattagctaattttaaataatccatttataaaacctccctataaatcctcaaattttattaatatttctaatatatctatttccaaacctgttttagtactctaagtatatttccacctagtaccttctctatttcctcatcactatatccatgctttactaaatatctgacaatgttttttgaagtttctgttgggttctcaagaccttttacatattctactttgggatgttcttttgtacctgttattttttttatatcaaatttagcagctagtactgagtgtaattttacatggtcgccatatactgtatctggtccaaaagctacatggtctattcctactaaatttttaatatactcaaaatgttccataaatgactctattgaatgttctttattcttctctgttattgtagtatgaggtgctgcttctacacctataacccctccttttttagcacatgctattaatacttcatctggagttagtctctttgtgttccataaatttcttgccccaacatggcttaatattattgggtccttgctatattctattacatcaagtgtagtttgaactccaacgtgagagcaatctattgccattccaattttattcattctttcaacagctttttttccgaaatttgtaagacctccatctttctcttcttttagtcctgaacctaatgcattggattcgctgtatgttatacccattaaccttataccaaatccatacagtatatctattctatcaagttcattttctattggtgctgcaccttctaatgttggtatcaatgctactttaccttcacttttagctctgcatatatcttctactttttcacactttatgacaaaatcttgatgagctaaatcacatagtctcatgcctaaatctattaatatatcatcccatttccaccctgaatttgatgttatcgtacatacaccatccattaaattatcaaatatagcatcataatatcctcttgataatgcttcataagcgcatctttgtttaccttccctattatattcaaatatatctctttctaggtgttctggaaataatactggatgttcatgtaatgatataaatattttttcatccactatacttttaaccttagcttcttgaatatcatctaattcaataaggtactctttaactcttttatctcctttacacatctcaatagatgaaatatcttttcctttttctaaataactataggcttcatatcctttgtaagctgacttcataacaacatcctccaagttctacaattttttatatttttcctatgtagcaattgatatgccaaaatataaattttaattgtataataaatcttgcaaaaaataaaaacagtagtaaggttgatatttactactgttttattaaaaataatcttcttagattatttattcaatatttttgaattatcttaatcttaaagataattttatttatttctatccattatagggatttttttagggtgttttgcctttttagtcccctatatcactcccttaatttttacatatgatataaagttctttccttcatcagttataaaactaccttgtttttttactccagataaaagtaaaccatggctctttaacttatctattctttttctaatttggtctacacttaaaactatatctttttcttttaaaatctcttgcagtttatttcttcctaataatatatttttattattccaagtttctatactgttcaatatacatatactttcctcaaagaaattagattgtttgaaatctaagataattgaatcgaaattttcattaactaaagtattgtttttttcaaatctaaattgttctggcaaatgctcgtaatctactctatcttcctcaactatagtatcaatataataaattaaatttttaagctctcttacatttcctggccattcatacaatgttaaagcttgcattgattcctctgtaaaacatttgttgctatttatttcatctaaaaaatacttacttataagaggtatatcttccttacgttctctaagtctaggtatctctatatgtaatacattaatcctataatacaaatcttctctaaaagaaccttctttaatttttttctttaaatctttatttgttgcagctataattctaacatctattggtataattttacttccgcccattctcataacttctttttcctgtaatactcttagcaatctctgctgtacatctaaagatatatcacctatctcatctaaaaaaattgttcctgtatgcgctctttcaaatatacccatttttccaccttttattgctcctgtaaaacttccttcatcatagccaaaaagttcactttcaataagtgtatctgacaaagaagatagattaactgcaacaaatggcttgttttttcttagagattcattatgtattgcctgggcaaatatttcttttcctgttccattttctccaagtatcaacacagaaaagtctgtagttgctatttttcttgcaatattaattttttcttttattattttactctcacctacaacactctcaaatgtatactttgatacaaaaccttttgactgaagtttattttgaatcttgtcctcaagcacttgaattgcacttatatttttaatgcttataatactctttattcgttcattattttcataaacatttactttattaattatcagttttttgttatttaaatttactacttcatcattaacttcatcttcttgaaaaaatatttttttgacaaccttatcactaaataagtccataaagttattagatataatttcattttggtctattccaactagattagaaaatactttgttgcaatatataaattttcctaatttatcaacagaggcaataccttcatctataatctccaaaaaactcttcatggttttattcatagttgtataatacctatatccacttactgtatcttcattgtatttttccttaataatatgtaatttatctatagatatatttagttttgtaaagatttctataactgtatttatatcaattaccttatcacctatgtcaattatttgctttatgttttgtggtatgctgtttctgcttcccgtaataattccaatctcacatttagacttatcacaacctggataatatggtattagattaatatgaattaatcctagttttctaattatcttggcagtttcatctgctgactctttataagcatctataaccataacatcagaatcattttctatacttattatctgatttatattttcaatatttatagtacgatgtactattacaataagtatatttttatcaatattattatgtatatattcctttatatcattgtctgaacatactacaagctcatagcttgacagttcaatatttatcctatttacatataccaagttatctatattacaaaattctccaaatatattttccaattgttttgatatatctatatttattttgtcatcagttgatacaaataaaatattatgttttttcatagtcccacctcctgtttaacgagtatagaaagtaataatttggtctattgtagcactttttaaaaaagttttaaatcttaaaaatcaaattttgtaccatttactattattttccataataaaataatgtaagctatcttttttcacatataatttaatttctaaaacggttagtttgacattattggaatataaacaaaaatttaatataaattcgttaatatattaatacatttttaagaatgacaaggaataaattataacaaattttaggaatatataataatagggtctcagaacttagttacaagttctaaaaccctatttgtttagtgtaaaaaacatcataaaatttagcttaaatcttttcacataatattactctttttctaagtgataataaaatatatctattcctctaaaaactgtaaaaattcctgattaaatagtttaagctcatcatagaatatagcatgaccactatactcaaaagtatataaaattgaatcttctattttttcattcataaaaactgcaaattcatacggacatatttcatctaatttcccatgaaatataccagtaggcactcttacacattttaaatcattaaataattcttcatctcttaaagatacagcagttccaatagtgccaatacctgatgcactaaaaccaatatcattaaaccatcttctaaagctttctggtggatttgatgcaaatactttttctccaaaatcggttaccatttctggtctatcagtacatgcttgtgctatcaatttatttacatcttcacgtgtcataccatatggaaattctggaggtctttgtacaaatgatggtgcagcagctgcagctaataccaattttgacactccatatccattaaataaactcatatacctaagtacgattgctcctcccattgaaaaaccaacaaaggtaaagtcttttaatccaatagcatgtaccaccttataaatatcgtctgctaattggctataagtatatcctcctgatgttgcatcagatttaccaaaacctcttaaatcaattgaaactgttctatatccgagttttggcaatatatttgtttgatattcaaatatcttatgtcctaagggccaaccatgtataaaaagtacagtttttttagcactcggattcaaatcatatactgctatgtttatatcattcacatatacataatacatatcaacagcaactcccttcaagaaaatgtatgatggttattttatatatatgaataaaatgatgaataactaaatttttaaatttatttacaatacttctctattgccttttcaaataaacttacatgaagtttttcatctaggattattctatttaatatagcttttatataagggtcttcaataagacttatatctttataataattattaatagccacatgctccaaatgcaaatctagttttaatctgttacaaatagaatttccataacatacaaaaccaccattccaatatgcaccacaagaacttgtagaacctctatatacaggatttccacccaataatcttatagtctttgctaatatctccatatgtaacatttctgttatagatatatttatccacatttcacttaactctctatgcgtttcatctaaatcaaaattatggtatagatattgatttacactcgtaaattcacttgatactccggcatagtcatccatcaataattctgcataatacttatttagacctaaaacttttatctctggatatggctcatcacttgaatatccatttcgcttgtgcatgtcgtaatgtgcatcactcataatatctcctcctttaaatttaatacttgatattaattgtatgcatcacgactttttcatataacttagataataaaatctattatattattttctattataatttatgtgtcaattcacccaaatttatttgatatgcaatatttctttccttagtgctacatatgtaataaaaacatatatacaatatattactacaaaattaataagcgtaatggctacagcatgtaagataggaatctgaatattaaaaaatactggagcatcaaaagaaatattaaacatgttgtatgaaaaaactgataccaatattccaccaaatattactgcaggaattaatggaatcgaaaaatataaacaaacatgtttctttaagatttttattacttcactatcaatcatccccaaagttcgaagcattccatagtgttttatgataatgttattttcgctcaataattgaatagagagaatgactgtaccaataatgcatataatgagtgccaaataaaaaagtggtaatatcaagataatggcttgaccagtagattgcatagcatactttccacttatataatccttattatcatatcgtaatttagaaacaaagccttgattacctgctactactactccagaattaagattttctaaagtatcaaactttttctgaaactcagtaaaataagcactatccaaaggctcacttgtaatagcaacataaagactatacagaggtttcatattatcaattaaataatctggaatgacaataatatattcttgtccatttccatatcctccatactgtgaaaagttctctatataaatacctgcaatacttaagtccttatctgatattgtcagtttatatttttctccaatataattcttatatgcatcagcaagataaggcatacaatggatgataaattgatttttgtccatctttattgggtttaaacccaacatatttcttagtatattgtaatcactatatttcataaatgtgtcaaactggttttctgcaaaagtataatccttatattgtaaatctcgccctatatctttcaagtatttagaaaggatattattacgaaccttcataaaggatgttttttcttctgtgtaaagagtataagaataatcctttttcacacctttcgtttctgataaatatccttcatatgaagaaaaatcatatgattcattcgggtgaaaaatactcacatcaaattgttgtaaatccactgatttattcatcacagaataaaatgagttagctattccaatacaagcaattgatactgtaaaaagagttgcgataatacccattataatgcttattccatttatctttgaagccagtagacgatacaaaaataagtgagatttcttatatttccaattcatccctttttcaaacatattctgtgcaatagatccaaatcccataaataatacgattagacaaaatacaatcaacaataaaccaagaaatacatctgttaatctaccactaggtattgaaaagaaaaaaatacccatacctccacacaaaacagacacacaaaacataatagacttcgtttttgtttggtgaattaatacattttcattatatcgatcataattaagcaaattaattaatttcattttaacaagttttttattactttttaattgagcaattaaatatattatgcagaagtataaaaaagtcatcccagcagcttttaatgaaaaatccggagataaagaatactttccatgaaacatattaataacaatagattccaaaaccttagaaacaaatatccctagaatccatccaacaataagagcagaagcacctaataaaagattctctataaaaagcattttaacaatttgttttttatctactcctaatatcatataagtacttatttctctgcttctttttttcaatataaaattcatcatataactaacaaaccagcctaaaataaaagtaataatgaacgaaaatatgataatcatataagaaaactcatcgcttcctccattattaagtatactagaaagttcttgcattacgtcggaaaatatcaaagcgttaaaagcataaatcaaagctacagagcctattaaggaacaccaataaataaggtactttcctgcttgtcgtcttgcattacgaaaagataatcctttcaacataatcaatctcctcccatcaaagaaagtgcatccaaaatttcgtgatagaaagtaagtctggatttttctccttttctaagttcgttaaaaattttcccatcccttagaaataaaattctctcagtataactagctgaaatagcgtcgtgtgtgacaagaagaatcgtagcctctaatatggtgtttatagtttccaaaagttccattaaagttttagatgaattagaatccaatgcaccagttggttcatctgccaaaataagtttgggctctgttacaactgcacgagctactgcacaacgttgcctctgaccaccagatacttcataaggaaacttcgaaagtatctcttcaattttcaattgtgtggcaatattatacacactattagtaatttcaacaggagaaactttttttattgtaagtggaagtgctatattttcttctaatgtcagagtatctaataaattagaatcctgaaaaacaaaacctaaattatcacgacgaaaaacagttaagttttcttcggatagttcagtaatatcttgattttcaagataaatttttccagcacttactgtatcaattgtagcaatacaatttaacaaagtagttttaccagagccagaagttcccataatactgacaaactctcctgtattaatttgaaatgacacatcattcaaggcctttgtaagtattttctgattgccataatatttctcaatgttctctactcgtaatagcatgttaaagtcctccttagtcaacaatttttccatttttaattattattgtcttatctgaaaaattcaagatatatacatatatgctttctttagagtcttgaatttgaatagtaggttcattagatgaaattagagatttttttacttcaatatcgtattttattgttaattcattatcatctccatttttattagtatcttctacatttttatttaaatcaatgttattatgattaaagggaccagtaaactttacttctgtaatagttccattttttctaataaaagaagcatattcagaccttagtggtatgatacttcgtgagaaaaaacccatcgaatccaatcctgtaattgaaataaacaaaacgagtacaacacataatatagttaatatcctttttttcatatgtttctccctcctttctattgatattgtagcgtaaatagtaatctgaatatatagaagttacttaactttatcttacagttttgaaagataaagaaatagcagcgcatttttagttgcactgcttctgcatattgatagctgtatttattgggaaattcaatgttattgctgtgtattcaccaaggctggaggacacatctatatcaattcccattttcttagacagttcataacaaaggtaaagaccaatccctgtagaattgtttgtagtccttccattactgccagtaaaacctaattcaaaaattcgataaatttcactttctttgatgccaataccattatcttttatagtaaacttaacactcttgtcttcttttattgcaaaaaatgaaatttcagctgaatcacttttgtactgaacactattgataataatttgatttaaaataaaaactatccactttttatcagtatatacactatactccaaatcctgtatattaatatgaatattattttgtataagaagcaatttattctttgctaatacttcttctacaattgactttaatgttatttcagaaattaaataatctttttcaacatggccaaggcgagcatagtacaatgcacgctcaatatgacgttctatttcttccatttgaaaacgaatttttcgtgtatgttcatttttataattttcacatataagttctgatgttgtaacaggatgttttatctcatgtacccattgttcaatgaattgtctatattcgtacatttcacgatgtatttgagaaacatgatctgtcatagatttcaatgataatctaataatattgtagtattcacgttctatgttagaagtaggtttttcaatcatttcaataaacagatattttttatccaattcgtctacaatgcgacgtaacttaataatttcttttttctgtttttgataacaaaaacatatccaacaaaataaaattgcgacccaagcggctataagaagagtcaactctccttgaccaatccctataagatgaagatatagcactaatgaaattgcacaacaaatatttaagagtataactaatactttatcttgaagaaaattacaaaacctcatatcctatatcccatcccccgttttgtaatgattaagtcagtaatacctataccccttaacttttctctaagccttgtaatgtttacacttaaagcattatcatcaatatgaatatgattgtcccataaatattctaccaaatctatacgaggcacaatactccctacattctgaaacaaataatacatgatttttagttcagttcttgaaagttctataacagcattttggtattctactgtagctgaaataaggttgagtataatctctctatatttaattttctgtttatctgatgaatctactcttttaagtaggttctttacccttgctaaaagcaaaggtaagttatatggttttgtaatatagtcatctccccccatagtcaaaccatttagttcatcaattgcactatctcttgctgtaataaaaataataggtatagtagaacaattcctaatctgtctacataaagaaaaaccatctatattaggcaaattgatatccaagagaattaagtcaggtgttgattcttggattacttgaagtacatcacaattatttgtatccaatgtttgtgtactatagccattattttcaaagaattgcattaattccttacagatgaacacatcatcttcaattatcaaaatattggttaaaataataaatacctcatttctttagtttatattgctttaattttgtaagtaatatatttttccatatattacttacaaaattactttttaattattcatcttttccagctactgatagctctttaataacaactgaaggtgaacctatactactcattggaaattctaaatcttcccctataacttcaatatctttcaacaggtcaaaatagtttcctgctactgtaatttgctccactggaaatactttttttccttctttgatataaaagcctttggcagctaaagaaaagtctcctgttactgaatttgcacctgaatgaagccctgcaaagctagtaaccatcaatccttcatctatatcctttataatttcatctaaagatttatctcctttatctatataaaaattagttggatatatgcttataggtgatgaatatgaagattttattccatttcctgtagtctttacacctgccttattagccgtttttaagttatgaagtaaagttataagctttccatttaaaacaacttcttttttaaatgtagctactccttcatcatcaaaaggagtagatgccataccattttctaaaagtgggtcatcaactattgtaactataggagatgctatcatgtctccttctctatttttcaataaagataatcctttttgagctgaatctgcattaaatatcccagaaaatgtgctaagcaaagataccatagcttcattaagcaatatagttttatatttacctgatggaatactcttaccacctactttagataaagcattatcaacaccaagttttgatatctcacaaggttttatttcttcaatagaatttgctctattatatcctattccatcatatttttgtccattgtcttctatgataggaactacaaaccctataagcatattagttttattgcttaaattaagacctttagtattagatataccattacttgatacagaataagatatagtacatttagataaatttaccaccttatctgaataagctttagtctctctttccatttctaaagctaaatcaatcaacttatctgcctctaaattttctagctctttagaataagtctttacatcattatagtgcttatctccttcatatataaattgtacatcttcattttcaatagtgtttactccatcttttacattttttatcaacatatcaacagctttatcatctaaaatttctgtataagaataacctatctttccatttaccttacctctaaaagataaaccaaaagatttatcaagattgtatttctcaacttctccttcatatatatttatacttaaattttctcctgtataataatatatttcacactcttcaaaaccttcacttagagcctttttaaataatatatctttaaaatttttaagttccacaattatccctcctatcttccacctacagtaatttcttttacccttatcataggttggcctacattagttggtatacttcctgatgatgagccacacatcccctgagcttgttttacgttattcccaaccatatctatattcataagtatatcgctaccttttccaattaaactagcacctctcactggctcttgtatttctccattttttattaagtaaccttctgaaactgcaaaattaaactctcctgttacaggatttacagaaccaccacccatttttttagcataaagtccatctggtattgactttataatgtcttctggtctatcttctccagcagcaatataagtgttagtcatccttgaagttggtgcaaatttgtagttctgtctacgagaacttcctgtaggattcattcccattcgtctaccattaagtttatctatcatataagacttcaaaattccattttcaatcagtatattcttttgagttggatttccttcatcatctatattcatagaaccccagtagtttggtattgtaccatcatctatagctgtaatctttgtggaagcaatctgttgacctaatttatctgcaaatacagagttcccctttgcaactgatgtagcttccaaagaatgtccacaagcttcatgaaatattactccaccaaatccattatctattgctaccatcatattacctgcaggacaatttttagcatgcaacatagtatgcgctactctagctgattcttttgcataatattctgggtctatttcttcaaatatttcaaaccctttacaacctccaggaccttcaaatccagtttgattttcattacccttagatgcaattgaacttatccctagtctggttcttattcttctatcctcaacatatataccttcagtgtttgcaattaatattttttggtctttatccaaatagctaacacttacttgagatatatcattactaaattcttttgcactcttatatgcaaccttcataacacttactttatctctatttcctattgaatttggataaatttttatattatgtatgttatttattttaatactgtcatttaatattacactttttccatcttccaatttacctaaagcaacagcagctttgtatgctacatccaacagactatttaatgaattgtcacttgtataagcatatatactcttcaatcctttaaatattcttattcctataccataatttcttccacctattgcattttctactttattatcaattaaactaatagaattatttatagtgtcttcttcaaaaatctcagcaaaatctcctccagtaattagacacttttctaataccttagaagctatattttttgaaagcataaatttacctcctactttaaatttttaattaacttttattcaatctttttacttgttaacaaacattatatactatattacttaaaataaggtaattatgaatatattatacatatgttttatactaaaatgttatcacattttatctatacatacccatataactagataattaaaatgtataatattatttgctatagaaaataatacactcatacataataaattttaggagtgaagtatatgaatcaagaatatgtaaaaggaaatcctatttttactaatattaataaagttccaagacaatttccataccttactgatgatattgatactgatgttataattgttggtggtggcgtaactggatgtatttgtgcttactatctagctaaaaacaatataaagtctgtcattcttgaaaaaggaaggattgcacatggaagcactagcgtgacaacttctctattacagtatgaattagatgacaatttgatagatttaacagaggttatgactctaaaagatgctctaaaagcatataacctttgtacttcagcacttgaagaattagatacatttataaagctatatggaaataagtgtgattatgccaaaagagatactctactttatactgccaacaaacttgaaattaaggctatcaaagaagaatataacttaagaaaagaaaatggatttgatgttgaatatattgatgaatccacaaacccttttagctttgatttaaaatcaggattgatagcaaagaatggaggacgagaattagacccatataaatatagtcaccatttgattgatgtaagtttaaaaaatggtcttcaagtatatgaaaatacagaagtaaaaaaagtagatttatcaaatgataaggttactgctgaagtatcgtatggatacaaagttcatggtaaaaaattaattgtagctacagggtacaatacaagtttatttacaaaaagaaattttgcaactaagtcaaatacttttaatatagcaactaaaccacttaaaaacatagcttcttggaaaaacaacattttaattagagataactgtgacccatataattatctaagaactactaaagacaatcgattaattataggtggtgaagatgtaagttttgatgatatagaaaatgaaactttagccaatgaaaagtatgatattttagaacaaagattgaaaagtatgtttaaggatataaaagacattgaagttgaatataaatattgtggttgttttgcttcaactttagataatttaggttttattggtccagataataaaaataacaatctatggtattgcttaggttatggagcaaatggtatactctttgcaatattaggaggtataatgttaagtgaattatatcttggcaaacaaaataaaaatatgaaattatttaaagtagatagatttgataaatagatattgtatattaaaagactataaaaagatgaaactttataattctaaaagttaactttgatacagtcttttataatgttccttttaaaaatactttatttataattaaatataaagtaaaatgttaaaatataactgataaaatttagtcataagataatatttaagtttatttgatgaaatatggaggaattattatgaaagaaatactcgttattgctcccactaaaggaacctatgaaaaatcaattcacatagttaaaaaaaacaaatatacaaatattgatgttgtatttggcaatctaaaagaaggtatacctcttgctgaaaaaagtattaatcatggtactagaattatcataagcagaggtggaacttacaatatgttaaaagctacttacaatatacctatagttgaaattaaagtagatgcttatgatattataaaaagttacaaagaggtaaaaaattccaacgaaccatttggaataattggatttaataatgtcatctacggtttcgatattatagaagaaatattgaataagaaaataactatgattgaaattgaaaaagaagaagaaatttatgatgctatagaaaagtacagaaagaaaggtataaacacatatataggagataccactgttgcacatattgttaagagacttaattgtaagggaatattaatcgaatctagagaagaaaacatacttagagccattcaacaagcagaacaaatactcgaagcaaccaaggatgaacaaaaaagaagattacagatagaagctatgacagattttgtacatgatggaataataacagttgataaaaattttaaaataacattatttaataagagtgctgaaaaaatatttggtataaaaaaagaaaatgcactttatcataatgttgtagatgttatcccaaacacagttcttccacaagtagttgagactatggaacctcaaattggtgaaatacaaaatatagggagtacaaaaattattacaaatagagttccaataattgttgatggccagattcaaggggctgtttcaacatttcaagatagcaaggagataagttcttttgaacatacaataagaaggagcttattaagcaaaggtctatctgctaaatacacttttgataatataattcatgctagtgaaaagacaaaagattgtatagaacttgcaaaaaaatatgcttgttatgatactcctatgattattactggagaatctggagttggtaaagaattattttgtcaaagtatacataactatagtaagcgtaaaaatgcaccttttgttgctgtaaattgtgctgccatacctccatctctaatagagagtgagttttttggttatgaggaaggttcatttacaggtgctagaaaaaaaggtaaagcaggtgtattcgaactagcacatgaaggtacaatcttcctagacgaaataagtgaaatccctcttgaacttcaaggtcgattattgagggtattgcaggaaaaacaagttatgagaattggtggtgataaagttattcctatagatgtaaaaattatctgtgcttcaaataaagacttaaaaaatatgatgcgcaatggtttatttagacaagacctttattttagaataaatatactaacattatatcttccttcattaaaagaaagaaaagaagatattataaaattatcagaattttttatacataaatattcaagcaaatacaataaaacgcctttaattatcactccaaatattaaaaaggcacttcttgaacgagaatatgaaggtaatataagggaattggaaggtatgatggaaagggctgttattgtggaatcatttgactcgattttattagaaaaggttagcaatgaatatacaaataatatagttgataaagataatagtgattttgaatgcagtaatttagatttaaaaactttagaaaaaaaatatatctataaaatttataacgaaaataatagaaatactacaaaaacctgtgaaattctaaagataactcgctccactctatggcgtaagttaaaagaaatagaagatgatgtttaaaaataatacatacctatatatatcaaaacgttttatgtttaattttaatacataaggcgtttatttgttttcaataaaaaatacaattatatgataaaaagaatctttgtaagtgaaattctcatcaatcatacctttaattataagtaatctacagcatttcaatcgattattaaaaataatcatgataactaaaaatacaaactctatatattggcatagtaattgcttttataatacctatataaaaatgaaagggagtgatactagatgcacatcttaaaatcagtgaaaaagataccaggaggacttatggtctgtcccttgttattgggagcactatttaatacagtatgtccacaagctcttgaaattggaggattcacaacatccttatttaaaactggtgcaatgagtatacttgctctattttgtctatgcaatggagctcaaatcaatatcaggcaagctggtaagccattgactaaaggtatagtacttacagcaacaaaatttataattggtgcagtattaggtattattgttagtaaatttattggacctaaaggtataattggtattacacctcttgccatagttgctaccatgactaattcaaatggaggtctatttgctgctcttgcaggtgaatatggtgactccacagatgttggagcaatatctatcttatctctaaatgatggtcctttttttacaatgcttgcttttggagtaactggacttgcaaatgtacctatagtagcactatttgcagcacttataccaatactacttggatttatacttggtaaccttgatgaagatatacgagaatttcttgcacctggtacaacattattaattcctttcttcgcttttcctttaggagcagcattaaactttaatcaaattataactgctggactacctggagttgtacttggtttaggagttactataataacaggtatgggtggctactttgtaatgaaacttatacgtgcagaacatccagcagtaggtgcagctacaggtacaacagccggaaatgcagctggtactcctgaagctttagcagctatagaccctactctagctacaatagcagctgtttcaacagtacaggttgctgctgctattattgttacagcaatatgttgtccaatgttagtttcctatctagataaaagagaaaaaaagaaaaaatctatttttaaaacaaataaaaatattgaagtaaattaatacttaaggaggtaaaattaatgaatgcaattattcatgcaaatgaaaaagataatctagttacatgtgtcagacctttagttaaaggtgaaaaagtttcaattgatggaaagtcttacatagtaaatgataatatacctgtctttcataagatggctacagaagatgtaaaaaaaggtgatgttgtatacaaatacggtgaaattataggaattgcaacagttgacataaaaactggtgactatgttcatgtacataacattgaaagtacacgtggtcgtggagataaaaaataggaggaagttaaaatgaaattaatgggttatttaagagaaaatggtcagtttggtattcgtaatcatgttttaattattccaacatctgtatgttcaagtgagacagctacaagaatagcatcacttgtgcctggagcaatagcaatccctcatcaacatggatgttgtcaaattggttctgatatagagcttacagcaaagacattaataggatttggaaaaaatcctaatgttgccgcagttttagtagttggtcttggatgtgatggtattcaagcaaaagaattagcatctgaaatagctacaacaggaaaaaaggtagattacgttgttatacaagaatgtggtggaacattaaaaacagtttctaagggaactgaaatagtaagtaaaatggctcgtgaagtatcaaaagaagtaagagttgaatttggtatgagtgaaattacattagcacttgaatgtggtggttctgacccaacaagtggaatagcttcaaacccttcaataggcgttgcatcaaaccttcttgtagatgaaggtggaagtagcatactaagtgagactacagaagtaattggtgcagaacatttgttggctacccgttttgaagatgaagaaatgaaagataagtttcttaaatttgtaagtgatgtagaaaaaagagcaattgctatgggagaagatttacgtagtggtcaacctactccaggtaataaagctggtggactttcaacaattgaagaaaaatcacttgggtgtatgtataaggcaggcaataagccattcaaaggtgctcttgaatatgctgatattgtacctcctgataaaaaaggattatattttatggatactccaggtcaagatatagattctatcactggtatggtagcaggtggtgcacaaattgtaatcttttcaactggtagaggtactccaacaggaagccctatttcaccagttattaaaatcactgggaatagtgatacatacaacaaaatgccagacaatatcgatataaatgcaggtagaattataacagatggtgctaaaatagcagatataggtcaagaaatatttaatgaaataatagaagtctgtaatggtaaacataccaaagctgaaagtcttggtcatagagaatttggcatttacagaatttcatctacattttagattgtaacaaaatatcttttataaatataatacttatgtagatacataagctaaaagttctttctaatcctataaaaattttctatactgaaaaggaactgtatcaaaattattttgaaaacagttccttttttaacctcttttactcaaaatattataaaataagatttaaacaataaacgtgtcttgattaatctctaagaagacataaataaagctaaatgtaaagtgagataaataaaatttaatatctttgtatgaaaagatatttggtataatatgtctgagagaattcttatttgtaaacaaataaaggatggaggatgaaacaaaagaatgaactttgaaaacacaaaaaataaaaaaataatagctactttactattgacactccttttaatcgtgtcattaacatgtgtcaattttattatgaatctaaataaagtaacacataatgaaacagaacgatatcttgtagaagtttcacaaagtatttccactacaattaatgtgaaatgtaaaagtatatttaggacactatattctatgggagatacttattttgagattaatgatagtgaaaaagaagtcaatagatacttatcaaaaaaattaaaattatttgaatttgattggttaggtattatagattctaatggaaattttgtaagtgcccttaaagatacaggtaatgttaaaggacaagacttttatagaaaagcccttcaaggtaaagaaacaattactcctgttaaatcacaatctggtacatatggaattttatattctgtaccactatacaatggcgataaaattgttggagctgttgctgcttggaatactattgatactatgagaaatttattaagtgtagaaagctttcatggtgaaggattttcccaaattatcgaccaagatggaaattttattgtaagttcagcaaacaaaaatgctccaaaaaatgtggtaaatttttttgacatgattaaacaccaaggaaaacaggttgataaaaataaacttgaagaaatgaaaataaacttaaaaaagaacaaaactggttctatgtattatacattaaatgatggtatttctaaggcaatgcattatcttccattacaagaagaaaacttatacctcctttcagttgttccaacaaaaacagcaagtgcacagtttgatttacttctaaaaaaagcaatcttcatcaatattttaattgttatactatttttattgcttattatattgattatgtttataaatcaaaagaacagggcacaacttataaaaatcgcctatgtagactctgtaactaaaggttacagtaaagcacgttttgatattgaagctaaaaaaattatacagtcatcttcatcagaaagctattcattggtatctataaatattcagaaattcaaacttattaatgattcttttggtagtgaagcaggagataaaacattaaagtacatacatgatgtcattagtaattatctagaaccaggagaattgctttgtcgagtttctaatgaccagtttaatgtacttattaaaactattcctcaaaaagaaattcttaagtacatagaaaatatcaccaatgatattaatagtttcaataaaaatgaagaatgtaaatattttatagctctatctataggtgtatataaaattgatgacccaaatctacctttagtttcaattcaagaccgtgcaaatgttgcacgaaaaaataataaaggaaacattggaaatcatccactttatacatgtgttttttatagtgatttagagcgtttaaaaatgattaaagaaaaagaaatggaaaatagaatggaggaagcattaaataataacgaatttatagtatatcttcagcctaaaataagcctcaaagataatactattgtaggtgcagaagcattagtaagatggcaagacccaaataaaggccttataccaccagacgagtttattcctttctttgaaaaaaatggttttattacaaaactcgaccactatgtttttgaaaaagtatgtagtatgataagaaaatggatagataatggagaaactccaatgcctgtttcagttaatttttcacgtgctaatttaaataatatagattttttagaaaaatacagaatgcttcgtaataaatacaacattcctgctaagctcttagaaattgaattaactgaaacacttgtatttgaaaatctccaaaaattaattaatataatagaccaaatccatgaagaaggttttcaatgttcactagatgactttggaagtggatactcttcactcaatatgttaaaagaaataaaagttgacacattaaaacttgaccgtgctttttttagctcacctaatgcagataatattgctgaaaatcatgtaatagaatctatagttaatttggcaaaaaaattaaatatgaatagtatatcagaaggtgttgaaacaatcttgcaaatggattatcttaaaaaaattaattgtgatatgatacaaggatatgttttttcaaaacctctgcctcaagaaatatttgagaaaatgacttttggaaaaaaactagaagaaaccagtatggatagttccgtttaaataaaataaaaaacttgtctctataaaataattttaatcattttataaagacaagtctttttattttccaatttaattttattttctaaatttcttatactcggcttgttttaaattccctttttaagaataataatacgattatcatagcaataaaatctgcaactggctgtgccaaccaaacaccatctaaattaaattgaattggaagtacaatgattaatggtataaataaaataaattgtcttaaaagagttaaaaacattgaatgtttaactttacttatacactgaaaatacacaggtcctacaatagaaatccccattataggcaatgtaattagatttatgcttatacctcttactgctatatccatcaaatctgaatctttattaaatatacctacaaatacttctgggaaaacttgtactattaaaaatccaaatgacaatatgacaactgacactatgatagataatattaaagttttctttgcacgttcatattgttttgcaccataattgtatgatattatagtttgcataccttgattcaatccaaacacaggcatcataaacatcaataaaatagatgtaagtgctgtcatagccccaatagctaaatctccaccataaacctttagagaattgtttgtaaacatgtgagttatacttatagctacttccatagcaaaaggtgtcattcctattgcaaataccttctttactatatctttattcaattttaagttacatttttttagttttaaagtggacttccctcttataaaataatatgttacccaaaagaatactactatttgacatagtactgttgctatagctgctccttttatacctaaattaaacacaaatataaatatagggtccaatatcaggtttaatacacatcctacaatcattgtccttgctgctaattttggattaccttctgctctaattgcattattaagagaaaatgcaactaaattaaatatacttccaatcaatatgacactcatatagtcttttgcataaaatattgaatctttacttgcacccaaaataaaaagtatatcttctaagaaaactaatcctaatatagttataattaaagagataattatagataatgtcaaagcattacctaatatcttctctgcttcttctctatttctttcccctaattttatagacaatcttgtgctagcacctactgataccaacattccaaaagctattattagagtaaatactggcatagttacaccaagacctgcaatagctatagagccaataccttccatagaaccaataaaagctctatctactacattataaagtgaagttaccatcattgctattattgccggtatcgaatacctaaataataaaatccatattttttcatgtcttaatgcttcttgattctccatgttgtcaccatttacaccatgtcataagttatacaaattggtttatttgttcttgggtctgttgctatttctgcatcaatattaaataattcttttagattatccttcgtcataacatcatatgcatcaccttcacaaactattttacctttcttaatacctatcatgtggtcagcaaatcttgctgcattattaagttcatgtattaccatgacaatagttcttccttgttttttatttagttcatctaataattttagtatctctaattgatgtgccaaatctaaatatgttgtaggctcatccagtaataatatatcagtttcttgtgccaaagccatagctatccatgccctttgtctttgtcctcctgataaatcttccatatttctatccttaaattctgcaattccagtaacttctaaactccaatttacaatctctctgtcttctttactagaattaccaaatccacttttatgaggaaatcttccataagaaattaattctgaaacggtaagaccactaggagcttgagggctttgtggaagtacagccatatcctttgctatttctttagacttctttttgtagatgtcctctccatttatatatattttcccactattagggctaataattctacctatagttttaagtattgtcgattttccacaaccattagcccctatgatggtagttatttttccttttggtatatttaaatttaaattttttataatatctgtgtttccatatgatacatttagattcttagtatttatacagttcataacaacaccctttcctaatcatttaccaacattaaataaataaagtacggcactcctattatagaaactactatacctactggtatttctataggtgctagaagatttcttgatatagtatctgctattaaaagtaataatgttcctatcaatgctgatactggtattaatcttttatgctttggtcctattatttttctacctatatgtggagctattaaacctaaaaatgaaatactacctgctactgctgtcgatacaccagataaaattactgcatatattataagtcttcttctttgtttttctacatctacaccaagacttatagatacttcatcacccaaatttaaaacatctatatatttagatttataaatagttatacccataaaaatcactataaatggaagcacagctattacatatttccaactggttccccaaatgcttcctgatgtccatgccataaccctattaaattcttgtgttgtaaatttcaattggaatatcgtcaaaattgaagtaaaagctatgtttacacctataccaataagtagtaatcttgacgaatttataccacctttccatgcaagagaatatataagaaatgctccaaataaagctcctataagtgcaacaataggcattgtaaatacagtcaagttactcataccttcatatacattaccattcataaggtatatataaactactacaaacaatgcagcacctgaatttattcccaaaattccagaatcagctaaatcattctttgtaactccttgaagtattacacctgctgttgataatgcagaaccaaccaaaagtgctattactattcttggtaatcttaatttaaatattgcaatttcatgattacgctgaccctgccctaaaaaagtctttataacatccattggttctatagaaaatgagcccatatttaaactcaataaaaaagtgataaaaataagcaccattaaaattgatataacaagtaatgttttagaatttatttttataatatttttcatagtacctatttctccccctttctaacaaggtatataaatattggcactcctataagtgctgttatagaacctactggtgtctcatatggaggatttatcatcctacttaatatatctgtatatacaagcaatacagctcctaatactaaagagctcggtattatatacttataatctgaacctactattcctttagctatttgaggaactataagacctataaaaataatattaccagacactgacacagatgctccagtcattaatattacaagtactatacatataaatctaacaaagttagttttttgtcctaatcctattgccacttcttctccaagacttaatatagttattcttggagccataataatagctaaaataaatccaataccaccagctacaaatagcaattttataccttcccacttcactcctacaagccctcctgatatccagaaacttaattgttgagataggttaaaatacatagatattgctgatgccaaagaaattagcaatgtaccaagagcgactcctgcaagagctaattttacattattaactcttcctcttgatttagaacttataaaatatataaataatccacttatacttgctccaataaatgcaaacatcattacactaaaacttccatgtataagttgaggaagttttttttgaagtaccagtgatatcgaaattgcgaatgtagctccttgtgtaattcctataacagatggttcagctataggatttctcgttattccttgcattattgccccagaaactgctaaaaaccctccaacaagtgcagctgctattgctcttggaagtctaacatcctttactattctcatatttattccatcttccatttttatcaaactatctatgacagttgatagattcatatcttttgccccaatagttatggataatacaattccaaatacaagtacaactatacttactaatatcaacaaataagttatattttttttactcagcttagtcaattatcctacctccttttcccttttaatcgtcagtataatatcatctattaagtattttaattttaagatttattaaaaataggtgtgaaaaatgaatatcattatctcacacctactaagttaagaattactttgttaattcatttttaactgattctaataataactcttttccaattggattgtatgattgactgaaaaatggagcagcatcaagtattgttacattaccatcttttactgctcttatttgagaccagatagcactattttctaaatcttttttatctgcttctgtagcaattacaactatatggtctgcatctatatctgttaaaccttccatacttaccattggtagtgttattccatcctgttttggcatattcttaggtctagctaatttcatatcatcattgattagagtacctattccaccatcactaaataccataaattgacctgaacttgccaacactggtaaataagttttttctccattcttttctataacttccttacctaactttgtagctttttcatcatacttctgtagccaacttttagcttcttcttctttgtcaaataactttgaaacatcagttaacttgcttctccagtcatttgcataatctttcatcataactacaggagctatttcttttaattggtcatatattttttcttgtctttgactcattattattaaatcaggatttacttctaatatagcttccatatccatagtatccatcattgagtgcccaactatctttacacctttaagctcttctcttatgtaacttggtaatttatcagtttcatatgagtctacatttgctgttgcaacaggcttataacctgctaataatagttcttcactacttcctgatatatcaactatttttttaggatttgatggtatcttaacctctcctttaacagattgtacaactcttgtctctgatttatctttatcctctgtattcttatctgaacatgctgtaacaagtactaacgtagttataatagatataaatattgcaagtgattttatttttttcatgattacttctcctacttgtttattatacttacatgatattgattatcataagcacatatttattatagcatttttctatttttagtcaatattattttgtaaaaggataaaaattcctaattaatcttaattatatatagcttagataaggttttcttatattaaacagtattttttttaagaattggacacaaacacaatgacttttaggttaaacaatgataaaatgcaatttatagataatgaatttagtaaggaggattcaaaacatggtacatttagtatattgtgataatgcaggaaaaaaaggagaaaaggtcttagataaaatcttggctggaacaaaaacaatggttattagaggtgctgctggtagaaaaataccacatagtagagtatttgaagatgagttactttattttatggaaaaaggaactggaaaaatatctgcaaaagccactgttaaaaaagtagaaaactatgttaaattaacagaagatgaaatttctaaaattttaaatgaaaatcaaccaaaattaaatttatctgaaaagcaaaaagttcgttggcataaaaaatgtttatgcttagttgaatttgaaaatgttgaagaaataacacctcttgattttgaccatcaaggaaatatggatgattggcttattgttgaaaaaattgaagatgtagttgttggtactagtataccttacaattatgagaagtctaaattttaaagtatcaataacataatactatattgctaaactctacttaaataaaaaaagagtgcatttaataattataaaaattatttttatacactcttttttaataataaatttaaattacttactttctaatctttcatatacatctataaattcttctgctaattgttgaaaattcatagctgtcattaaatggtcttgtgcatgaataagtataacacttatttcagttttattaccattagcttcattttgtatcaattctgtttggaatttatgagctttatgaattgattctttcgacttttcaatacattctctagctttatctatattcccgctctttgcttcttttattgcttcaaatgctagccctttcgcatcacctgcaaatccaattattccaaaagatatctctatcatcttctcatccatttattcgacctcctaaatatctctatagcttgatatgactaatccattcttttctaaaaattctttgacttttttagatgtaagtatcttgtgctctttcgttctatcaatagcataagatgtagaatttaaaatataatcatctaaaaaagctgggtgagacataatatccactacatcatacttcattatttcgtctatattttttataaaatattcttcacttacattttccttataaaaactatctattaaaggaactactttagaatactctaaattatattcaaatccacctcttattggaagattatacttggttacaatcttctctactactggctttaaacttactaaagtatggatatgatggtgactatctaaatgagatatatctattccaagcccttttaccctatctatttgagcacaaagttctctataaatctcatcacaatccattttttcaataatttcgtctgtaatcctcctaataaaaaaaccgtctttatcaacaatagtttttaagttagataataatggtctaccacaacttaaagtcatatgaactccacaatttaaagttttattttctttaagtaagcctactccatgttctaccccaggcatatttgccatcatagaagtagacctaactataccattattatgagctgaaattattccatagttcacagcttcacaatatccaaaatcatctgcatttattataattttagtcataccataacctactttctatagacaactatctattaaatctaggaagataatctttatgagcttccaacatttcgtctaatatagtttttgctaagtcatcagatggaatcaatgggtttatacaaagtgccaaaagagcagattcataatcgccatatacagctgctttagctaccaatacttcaaatgatttgatttggcttactaatccatgcacagaatctggtaaatatcctatacttattggttttggaccatttttggttattacactactcacttctaccgcttgttcatctttaaaatctcttatagaaccattgtttaatgtattaactacttggatatcttttttgtcattgtatatagaacttattaaattacaagcagcatcactatagtaagcccctcctcttttttcaagttgaggtggttttacatctaatttttcatccttatataattcaaataattgttcttccaattctttaactacttgacctctagcttttccctctttaaactctctcaactcatcctcaagcatttctttagttttatagtagtatctatgatatggacaaggtattgcacccaaagattttacaaattcagcattaaaatcaattgcctttatattttgcatacttatatctgctttgacaaacttatcaattgcttcttttgtaacatcttctccatctaaagatacatttagaccataaaccatatgattaagacctgcaaaatccatacttattctgtcactttctacattaaatagtttggcaacatcattttttaaatgaattggcacattgcatagacctatatatcttctaaaattagtatatttgaatacagcctctgttattattcctgttggatttgtaaaattcaccatccatgcatttggacataattcttccacatcttttattatatcaaatataactggtattgtgcgaagggctttaaataaacctccagcaccattagtttcctgccccataactccatgagataaaggaatagtttcatcttttattctcgcatctaaaagacctactctaagttgtgttgtcacaaagtctgcatctcttagagcttctcttctatctaaagtaagatttattttcatatctactccagctttttttaccatcctcttagctagatttccaactatctctaatttttcttttccagcttctatatctacaagccataattcctttacaggtaactcttcatatctatttataaaaccctctacaagctcaggagtataacttgaacctcctccaattgtaactatttttagtccctttttcatctcattataccatccttacctataatttaatatactctacaaaaccctatacatttatttaccgaaataaaactacctagttgttaattttcaatttattagcttccattttttcagacgctatgacaaatggaatatatattaatattgataatattaaattaaatagtgctaaagctccaccagtccagtcacctgtagccatcgctccacctaatataggaggtgttacccaaggtattttaggtaaaattactggtgctactaatccaaaatctattgctaagtatgatacagcactacatatcactggtgcaagtacaaatggaatcataaatataggatttaaaactattggaagtccgaatatcaatggttctcctatattaaatattgcaggtggcccacctaatactatcatttctttacgtcttctcccagctattaataaagctactattaatcccaataccattccagaaccacctaaatatacaaatgcatcaaagaatgcacctgcaagtacatggtatccttccgttgctcctgcttgagccaaggcagcattttctccacctaatttcataagtatagtttctgtaaaaggaagtgctatatttgcaccatgaagtccaacagtccaaagtatatgaattataaatgcaataagcattgtagaacctagactatcagctacatttgatagcggtgctcctaaataagtatttaaaatatctgttaagaaacttccattagaaagcatttttataaatattcctattacagtaaatatcattatagttaacattcctggtattaactttgcaaatgatcttgaaactgctggtggaactccatctggcatttttatagttaatttctttaccttagataatcttacaaatatctcagttgataataatcctattaatatagaagagaataaagctgctgtacctaagtaggtttgttgtatcattccccatccttcaactactgtagttcctccctcaggaactattttaccaatttgtggagccattataaaaaagatagataaagctataagcccagattgtaacccatcactctcataagattttgctagaaaataagcaacacctattactaagaatactgccattgtacctattgctccccaccaaaggtcgcctccaaatgtggtccaattttctccaaatatacttgccatcaaatttttgtatgcttccaatggtaagttatttatcaatgttcccaaggcacctaccatagttataggtatcattactataaatgcatctcttactgctactaagtgcctttgagctcctattttagcagctacaggcactatatatttatccataaatgacatgaatttttccattttacatcctccagtacaactttattttgaactatttaactctacagctctatctaacacagcttttccattacatcttccataatccatcatatttataacttctactggaatattatatggttttgccatttcagttgcttttcctaatacatatctaacttgaggccctaaaagtaagacatcacaattttctatttcattttttaagttcacttctgatatagcccatatttttgcttctataccgttttcctttgctgcatcctccatttttgtaactaataaactagttgacattcctgctgaacaagctaacattatttttatcattttttcccctccaaattagattcattaaatattttttaagtcataaattttttaaactatacatttaaaatatgcttttctattaattttttcttaatgtatatatcttatttttaaatgtatatacatttaattcttgatattattatataccaaatgtatatacatttcaagaaaactttttcattttatttaaattttattcgacaacagcattcaaagttaatgtatatccatagtgatatgtgtgtgagtactcaaaaatctcactattttgtaacttacaaatttggcttatatataaaagtggctctggttcttctaattttagattatccatacattcttcattcgatattacagcttgtacttctctctctgacatggctatcttgtatccacacacttcttcaacaaaattataaagagaattttcacaatgagtcttatttaaatttggaaataacttaactggcatataagtaatcatatatgaaactcttgcatcattggctaatcttactctttttatttcccaaacattttcttctaaacttatattcaacttacttgataaattttcatctgcctgaactatttcaagagataccaatatattagatactttatagcctttactttccatctctttagtaaatccacttacagacgatatattatcatatatattatttgcaataactatactacctacacctctttgtctagttatatagccttctttaactagattattaagtgcagaccttacagtcattctagttacattaaattcttcactcagctgtttttcagaagggattaaatccccttctttcaaactgtctgaatttattaactctctaacatgattttctataactttataaattggctctttcatttaattcactccttattaattaaatcttttatataataagataattttatatacaaataaagaaaatgtctatacatttaagataatttaaattttattcagacatcttgtacaactttccgagttttaataaagatataaatagacttatcattaatataccttttaatatacttgataaggttatactccaccatacaccatttagacccaacatttctggtctagatataaagtaagccaatggtactcttgcaccagtcagtatagtaattataatagaaggtatataggttctgcctaatcctttgaaagctcctgttgttattatttctaaacacataaaaaattgagaatagcctaatattttaagataaattgctcctttttctattgcctcactttcatctataaaaatagaaaatatactctctcctgcaaatactaataccaaagtagttattatcccaagtacagaagatacagttatagctattttgcaacctttatttattctagaatacttcttggcaccataattttgtccaacaaaactgcctaatgcaactgatagcccttcagccgtcatccaggaaattgcttctatttgtgagcctactttttgtactgcaacagccacaggcccccatgatgctactattactcctaatagcattgagaatactgtaaacataccactttgtattgctataggtaatcccaatttatacagaactttataatatttagtctctatttctttaaatagtcttaatttaaaatattcttctttacttttaactattatatatataaaacatgtagtaactactatctgagcaaatacagttgcaatagcagctcctgcaacaccaagttttggagcaaatccccatccaaaaattaatataggatcaagtataatattagttattaatcctactgtattaatacgaaaaggagttttactatttccaagaccgttgaaaattgcagtaaatactggattaataaaataaaataccatacctagagctactattatcaaatactgtctagacatggttataacttctaagtctcctaatctaaaaaaacctatcaattgtttattaagtactattaaagaaattgtatatattattgctagtataatatttatttctattgctgacttcatatatgatttagtagtgcttatattatttgcaccaatactttgtgctacttttatctctccacctacttttgaaatcataataaatgccattgcaagccatggaaaaaaaccagctgttccaactgcagctactgctttacttccggctttaccaacccatatcatatctatcatgttataccccatctgtataaatgaagtccccattattggaagtgatagcttaagtaatttttctgtaattcttccttctgttaaattaattctgtctttcattttccacctcttttatattaaatttatttgcttatatagctagattaatcattttatttgattgagttcactatccttcaatttatattatcatatctcaagattgcatctcaaccatacttatgtttaagataaagtattttacctatctctgataaaattaatacttatgaatataaatatagtcatttcatcaatacatattataacccttaacttaacttcaattaagtatacatactgtaatcaattagaatattttataatgtatcttccattaagaaataacaaatataagtgatttatctataattttatttatacataaaatagtatactgcaataataaaaaaactatatttgaatactttaagcatgtttactaattgtaatttccacacaaatttgataatatatgaatatattatggtgaaatttatagatatatattaattatggggagattgtgggaggttcttttcacaagacatttaagctatgaaaataaataaaaaatttaatagagttgatatgcaggtttcaatacttactgcaattattgtaataatatcttcctcatgtgtatatttttttaattatacattaacttataagagcatgatatactctttaagtgagaggtcaaaacatatctatgaatatgtagagagaaatattgataaaaatacctttactgaaattaattctaaagaagaccaatcaaaaaagtcttataaaagttctaaaatcctattagaatctgtaaaaaatactactggagtcatgtatctatatactgctaaaaaaacaaaagatggatcactagtatatgttgttgatggtttaaattcatctagaagtgattttagaaatgctggtgatttgatagaaaaagagatttggggagatcttaacaaagcattagataatcatatattgttacctaaaaagattaaatcaacatcttggggatacatatttatatcgtattttcctattcacaatgatgttggtaaggttgttggagtaataggaattgaatttgaagcaaaacatcaatacaatacatttaaatttataagtatagttacaccaataatagcattattaacttgtctaatatcagcattgattgcagtgattctatttaaaagaatatctaatcctacatatactgattttgctaatacagattatttaacaggcctaaaaaatagaaatgcttttgaaatagatatgaataacttaaacaattcaaatctaaagaatctaatatctatcatatcaatagatttagacggtttaaaaaagattaatgataaatttggccatcagacaggagacttatatattaagcaagcaagtaaaattatacaagatgtaataaataaaaaatatatagtttatcgtattggaggtgatgaatacataattattctaaaaaatttatctcacaaagaaataaatagtattataaataatattaatttaaaaatagttgaagaaaactcaactaatgaattaaaattatcaatgtctattggatatgctatttttgatgaaaaagtagatgtttctttatttgatacatatcgtcgtgcagattctcaaatgtatgataacaaaaagaaaattaataaataatatcaataataaatttaaaaagtctattctttaaataataaatcataagaatagactttttaaatttgtgtttttataagataaattatttaattaaagtttgttcttttttctaaacgattctttataaattcatatattactttcactaatatatttgtgactaatattaacacagctagtgctgctgcctgtgcagtactccccttatcatctagttgtacaattgatattgcagctacttttgaacttgcagtatatataaaaactagtgctgatattgtcaccatagagtttagaaaaaagtacataaagttctctaaaactgctggcaaacaaagtggtatagttacgttcttaagaattgatgcgctgtttattcccattgatttagctaccatgtccaattctttatctactttcttaatagcagtagtagctgttataaatgctactgaaaagaaatgaactatattacatataaccattataagtaatgttccatataatccattaaacaaatttttaatgtatattgtatccataaaattaaactctaatttattaaaaaataatacataagctatacctaaaactaatcctggcaatgccataggcaatgtacttaaaaaatacccaaatgattttaaatatggagctttttctgttttttcatttaaatatgcaaataagaaaacaaagctcgtccctagaatagctgtcaatagtgacatttttattgaatttataaatggtttaattccatcaatactgtttttcatagaaaagtgttccagtgtaagtcttaaatcatatggccaaactgatattaatgaggataagattacagttaacattacagctattataccaaatgcaataattcctacaacccctcctaaaatactatctcttaacttattagttttaaccttatatggaattgactttgaagttatatatgagttttgatttttttcaatttttttagttactataaacgatattattgcaggtattaaaagtaatattgatacagttgctcccattggcatattctgttgccctataatttgcttatatacatctattgataatacattaaactctcctcctatcacctttggagctccaaaatctgtaaaacataatgtaaatgatacgaatgcagaacttattaaagagtattttatacttgggattgttatgcttataaattctcttatcttgcttatccccatagtattactagcttcatatagtctataatcggttgaacttagagatatataaagtatttgaaaggattgaggaaatacatatataatttgtgccaatattattcccactgctccatatattggaacatgcactccaagtaaattagttaccaaaccttgatttccaaataaatatactagacctattgcatgcatcattgttggagcaaacataggaaacatagctaatgatttaaaaaaacctttaaatttaatctttgttctagttaatgcatatgcatatactaatgcaagtgttagtgatattacagttgatataactgatacaaatactgtattttttagagaatttaatagagattcagaagccaagtattcttgaaagttttgtaatcctacaaagactccatctttatctaaaaaagcctgtacaaatagatatattataggtgctaataaaaatattactaaagacataactaatactgtaagcatacatttttttatatctaaattcatttttgatttaagacttatacttttagaacttatagcattattattcatacacttatgctcctttaacttttggatactttaaatagtatttttcgtctatacttatttttacaaggtcaccttctactaaatttaaattaacccactcttttatagaaacatcacttattatgaaattttcatttaatttatcttttatttcaactctcaataaattccctctaaactctatatttgatattataccttggtagttttcttttgtcgatttctctatttgaacatattctggtcttacagttaatatagaatctccattatcaaaacagtttgtatctcctataaattgagctgtaaataggttttgaggattttggtatatttcttctggagtccctatttgcattatatctcctccatttagaatagctattttatctgccatagttatagcttcttcttggtcatgtgttaccattattgtcgttatattaagttctttttgtaatcttttaatgtccattctaagcttgtgtctaacctttgcatctaatgcggacattggttcatctaaaagtaaaaactttggttcaagagctaatgctcttgctattgcaatcctctgttgttgcccacctgataatgctttaggatatttatgagcttcattagtcaatccaactgtttcaagtacttccttaactttattatctattttttcttttgaaacttttctctcttttagtggaaaagctatattgttataagcagtcatattcggaaataatgcatatgattgaaatactataccaaaacctctctttgatggctctaaatttgtaatatctttatcctggagaattatagttccactatttacatcttcaagacctgctattattctaagtaatgtagttttaccacatccactaggtccgagtaaacatagaaattccccttcttcaatatccaaactaatattatttaaaacccttttttggtcataacttttaaacacattatttatttttaagtaactcatatcttatctctccttatatagttatttttttattttaaattttatatcctactttttcttctaaaattctttcatctaaattattaatttaaaccttacttactttcagattttgaaccgtattttgattcccaagttttaagtactgtacttctgtttttggcagcagagtttaaatcaacttcttttataagctgttcaaatggttgtttagaataaccttttggaactggattatatgtctttatggaagtaactgctacttcatgtgcatatctatccatagctgaatcacttattgcccaatctaaaaatagctttgcttctttttttatattatcttttttaactaaggcatttgcttctaagtcccaacctgaaccttcctttggaaatacaacctctataggttctccactagataattgttgtgtagctctatatccaagtgtaatacctattggatactctccagagccagctaacttcgcaggttttgaacctgagtgtgtatatgtagctatatttttatgtaatttatccatgtaattgtaagcatctttttcacccatcatttgaataagccctgatactgtaagataccccgttccagatgatgctggatttggcattgttataagtcctttatattctggttttattaaatcttcataactttttggaatatctatacctagtttcttaagttccttataattaactactattgctgtctctgggacactcattcctacccaagatacatcatcttcagtatctttaaattttttatcaactttatcataatttttaggcttatatgcttcaagtgcaccatctttttttagctctatcatgttcattgctgataatccccatataatatctgcttgtggattatctttttctgctaatagttttgaagctattacaccatgagaatccataactatctctacatctatattgggatactcttctctaaaaccttccatataataagctatctgctcttcctctagtgctgcatatattgtaagtttattatttccttttccttgagtagtttgtggtgttgttgatatgcaacttgtcataaatgtaatcactacaatgcacagacaagtaaatataaattctttcatatcttccccctttgtgttttttcctttttttatttgttttttattgtttttgcttatgtttatataatacacctaatttgttaatataaagttaagtgtaaattaacagttcgttaatttttagaaatttttgttaaatatattatttttagttaaatacagtctgtttttaaacaatatattaatttttatagtatctacattttaatttaaacataaaaaataagtctaacctctataaagtagaatgttagacttatttttataagtatttaattatacaaccaaatcattttttttcttttcttcaagtgcttttttaagcaccatatccttaaccttcataagtctagtagtacttgctctctcattttcttcaagcttcatagctatatacttaatagtctcaatgtaatttggtatcattacattttcaagagcattaacacgtctacgtgtcttttctatctcttgtgcaagaagctgtgcacttttttcactttctgcaagtcttaaaagtggttgcatagcatctgagaaagcttccatagcagaatctaattcacctgatgtaaaagcaagaccataaggataaatatcactttgattgttttcagttttaaagtcaaacacaggaacatcaacactcattatatttctcgtagaaacatctactgaaactgattgctttggcatcataagtgctgaacccagatactcctgactcataactgctcttgcgattataaagtttttataagcagtatcaagagcattttctgcttcttcacgcaatcgcttattttctcttacaatctcaagaaattgtttcataagttcatcaagtttatctttaagaagcttatgacctcttgtagcagttttaaggagtttcttaagtctagtcatttccatacgtgttggatttatatttaatctagccacagatatcactccttaggcatatatttttcaaaatattcatcacggatacgtttaagttcactttttggtaacatactaagaagcttccatccgatttctaatgtctgctcaatagttctatcagttctaaatccttgtgaaacatattctttctcaaattcatctgcaaacttagcatacattaaatcaatctcagaaagtgcagattcaccaagtatagccataagttcttttgcatccttacctcttgaataagctgcaaaaagctggttcattgtatctgcatggtcttcacgagtcttacctttaccaatacctttatcttttagacgagaaagtgatggtaaaacatctataggaggctgtatatcttttttataaagttcacggctaagtataatttgcccttctgtaatgtatcctgtaaggtcaggaattggatgtgtcttatcatcctcaggcattgtaagtattggaatcatagttatagacccttcatgccctttcatttttcctgctctttcatacatagtagcaaggtcagtataaagatatcctggatatccacgacgtcctggaacttcttttttagctgctgaaacttcacgcaatgcctctgcatagtttgtaatatccgttattataacaagtacatgcatatcttgctcaaaagcaaggtattctgctgctgtaagtgccattctaggtgtagatacacgctctacagctgggtcatttgcaaggtttacaaacactacagaacggtcgattgcaccagttgctttaaaatcgcttataaaaaattcagcatcttcaaaagttataccaactgcagcaaatacaacggcgaacttagaatcagttccacgtacttttgcctgtcttgcaatctgaactgcaagattggcatgtggcaaaccagaccctgagaatataggaagtttttgccctctaaccaatgtattaagtccatctatagcagagactccagtttgtataaattcggccggataatcacgtgctgctggatttattggagctccatttatatcaagtcttttatctggtataatttctggacctccatcaataggtctacccattccactaaaaacacggcctaatatatctggtgaaactccaaagtcaagactctttcctaaaaaacgaactttactttcagcaaggtttatacctgttgagctttcgaaaagctgaacaagtgcagtatctccatttacctctagaactttgcaacggcgaatttctccatttgaaagttcaatttctccaagttcatcaaattttacaccttctacgccgtttattaacataagaggaccggctacctcttgtattgacttatattcctttatcatagttcttcagcccccctctttttaataaggtctgcaagctcgttgtctatttcatcttcaattgaatcataagctgcatctatatcgccttcttctacatacttagcacgaccaatcttttcaagaactgaaagcttgataatatcgtttatagtaacattttgcttgatagcatcttgtgctgacttatagaattttaatataagtcccatcattctatattgtttatgaagtgatgtataagtatcaacttcatggaaagagttttgatgaaggaagtcttctcttatagaacgagtaacctctagtatcaatctatctccatctgaaagtgaatcaaccccaaccaattgaactatttcttgaagttcagattcaacttgtaaaagtttcatagcttgagctctttgagctgagaaattatcatttacatttttatctgcccatacatcaactttttcctgatagagtgaataactagtcaaccagttaattgctgggaaatgacgtttatatgctaaagatgcatcaagaccccagaatacttttactatacgaagcgttgcttggctgacaggttctgatgtatcaccaccaggaggagaaactgcaccaattgctgtaagtgttccttctctttcatccatacctagacaatttacctttcctgctctctcatagaattgagcaagacgtgaacctaagtatgcaggataaccttcttcaccaggcatctcctctaaacgaccactcatctctctaagagcctcagcccatcttgatgtagagtctgccataagtgcaacactatatcccatatctctaaaatattcagctattgtaataccagtgtatatagaagcttcacgtgcagcaactggcatatctgatgtatttgctataagcacagttctttgcataagtgactcgcctgttcttgggtcttttaattcaggaaattcaagaagaacatctgtcatttcatttccacgctcgccacagcctatatatacaactatatctgcatctgcccatttagcaagctgatgctgtgtaacagtttttccacttccaaaaggtcccggtatagctgctaccccaccttttgtgattgggaaaaatgtatctataactctttgacctgtaacaagaagtgaatctggtgttttcttttctctatatggtctttcttttctaactggccatttttgcatcatagttacaggtatatcattacctttttcatctgtaataacacaaactgtatcttcaacagtaaattcaccagaatatatttcttttatagtacccttaactccataaggaaccataattttacattctactactgctgtttcttgaacgccaccaattatatctcctgctacaaccttatcaccaacagattttttaggtttaaattcccacttagttgttctatcaagtgaagatacttcaacacctttagttatattagtacctgaaatatcatacattttttcaagtggacgttgaataccatcataaatagttgaaataagacctggtccaagttcaacactcataggcattccaagagaaactacttcttcccctggtcctagaccggaagtttcctcataaacctgtatagaagctttatctccatgcatttctataatctcgcctataagatgtttatctgaaactcttacgacgtcaaacatattcgcatctctcatgccctccgctacaacaagcggtcctgacacctttacaattgtgcctgttttcatattctctcacctgcaatcatatactttatcaaaatttaaatattccctcctatattttattagcacatatctttagcaccaataaaatttgagattgtcttttattcaactttcatctattctttaaataatatatctgcacctatagcacgtttactagattctcttacttcattcatacctaatcccatacttcctccaatacctggaataactataatggcaggaagttggtaatctttgtattttgctattgattcttttgcaagcaatgatgcctgttctgtaatataaattatcgcatattcatcttcaaccaacttatgtatactttttttaatttcgtcactatcataggctgggaagatatctattccaagagctaaaaatcccatgatgctatctttatctccaactactcctaccttatacataagcatcccttagcctttcttttatagtatctgcgtctatattattaagcttactagtcaaaataattctaattgtttttatctctgattctttagcatataaatatgcaattagtggttctaatgtaagaggcttaaattttgctcctctaacatattccataagatagtcatcacaaagtttttcaaagacagtaaaaccactatccatgccatttttacagacatcagagtaagaagtagatttaaaacatgatgctggagtatctgaggaaaaagcttctaagaatttttccttatcaagtgagccacctgaaacaaacacattcataaacatatcaaaatctttcttcatatttttgactcttataaaactctttagatttgttaaatcgcaaactttcataacataatctattacaaatttgttttggctttctttagcagtttctttcatactggtaaaggttgctttatctagaacaatatcaaccatctggccattttgtgtcttattataaacatcaaatgcctctaatatagctgatgacattatcttaggtaaatcactaaaactacgatttgctaaagattctctaagcttaataagaggaattgtacctccatcaattaaatatttctcaccatctacaccagaaatttcttctttaatcagcacttttaaattgtgatagtcatttttataaagaaatacatcaacaaatttttcttcaggagctagacttttaagaatttcatatgtctttgataattcttgagtcaaaatattctcaaaattatgtatattattatttgatgtatcagcataacctgcctcagctataattcttaaagagtcttcagggcttttggcttctgccatttgaataaacatttgtctgttaagaagctgtttttcaagcactcttattcgtgcaacggcatagggataagttttttcttctgccattttttaacccctccttaattaaacaaaatttctgctgcaatttgttcaatatattcatgctctactgcaattatggcttcaaatgaataattgtactcaatgtcaccttttttaactatgaaacctccagtaatatctctagtttcatcagacactttaatgcctttttttgatagcacatcttttaatgtttttttatcttttttagataatactatctctgaatcatctgtacaatttgatttttcaatcatgtttagtataatctcttcatattcattatctttaagatttaaaagtttgtttttagcttctaaaattacctcttctaaaatctcttgtttttttgataatatttgctttttagcctccatataagctcctgatatttccttagaagccgctttttctgcttctgcctctgcaagctttgtataggaagccatttccttttcagctttttcattagctgaatttacttttaaatctgcttcacttttagctttatccaatatttcttgtgcttcttgtttggcatcagctataattctgtcaatcattttttgttcattacccataggagtgcttcctccttttcattttttttacttatgaattataatttataattaaccaattgcaattccattgtaagctaagaaagaaacaagtagtcctaaaagagcatatgtttcaactattgctgcaaatgttatagctttaccaagttcttcaggtctttttgcaactattccaactcctgctgctgctgctttaccttgtgctatacctgatactaaaccaactaaaccaattggaagtcctgccataagaagttgtaaaccttgagctgatgttggtattgcatctccaccaataatccctgcttttgataaaataaggaaagctatgataaatccatacagaccttgtgtaccaggaagaagttgtaaaactagaagttgaccgaatttactagggtcttctgttacaacacctgctgcggcttgacctgctattgaagtacctttagcagaacccatacctgcaaataatgctgctatagcagctcctgatattgccaaaaattgaccatttcctaacgcgtttaaaaattccatatttacatctcctttttattaatgcttgtatattttgttttatacttaaacggaacaaaaggaactcctccgccttcataaaacttattgaaaaattctacatactgtaacctacttgtatgaacatatgcacctagtgcatttataagaaggtttattgtgtgtcctacaacaccgattacaactgcaagtatcggaccagctatagcccctaaaaggttgataacttgtgctataactcctgttgttaaacaaagcgccataattcttgtataagataatatatcagcaaaataacttgttatgccatagagacttgaaaatcctttaaaaagcttaacaggaatacctttaaagcttcttccttgagtaagtacaagacctatagcacctataattgctaaatattttcctacttctgaaaatacacctatgtcccctgcaacaaaaggtattataagtagacatacacctgttatacacaaataccaaaaacctatgtcaaagattgcatctattacctttccacttcttattaatgtatatgcttttattcccaaacctacatatatatggataataccgaacagtaacgacattcccataagtgtcataacatcctctaaaggattaattaatgcttttataggaattaaatcccccaaaatacccccgaatataagaccccatacagtagttgaaactccacagataccaataagtttaattaaatttccttcacctttttgtatctttaatttatatacaacaaatccacagactactgcaattattaacccatatgcggcgtcacttagcatcattccaaagaatacaacaaagaagaaagttaaaattgtatttgggtcaatatcttttgtacttggatagctgtacatgttagttacactttcaaaaggtgttactaatttattgttttcaagcagaattgggaagccttcttctttacttccttcttcagtctgaacacaacaatcaaacttttctgtaatttctttaattaattcatctgcccttttgcttggtaaccaaccattaagacagaatgttgtttttgttttgacaagtctctctataatctttttttggtctctttctatagtgtaaaaatcatataggttttcaagcatgtgtatactatctgcatgtcttttaatttcctctgttttgtccttagaaacgttttcctgcctaattatcatttcattgtatttcttgatagcttgtaacggtgtaccttcttcatttggtaatgaaaccactgaaaaattaaattcttttaaaacttctaaaacatcatcaaaagtttcttttaaagtaattaaataaacatagttcattaacttgtcagaattgacaatcccaataacactttctggtatttcatcttctaattttactcttaaagcatcaatatttgcgcttatgggcacagttccaagtatagtttttgtatacttagtttccatattttcaagaggaatatcaaagttcacccatggttctaacatacttttattgttgttaagtaagtttatgttagaccttattgtacctatctccttgtgcaaattgtttaactccagagcttcagcataaacttgcccttctttttcactatcaattttgttaaactctctttttggtgcaagtagggattttttttgtttcactagtgaagaaacaatattaattgcttggtttacatgagacattttctgctctagcattataacttcagattcttcactatcttttacaagataattttttaattcctcctcctcagtaagaaaggcactatcatcaatctgaacaaacccacggttcataagtagctttaaaatctggcttttttgagcttctaagccaacaatagatattttgttcatattaactattgccatattatctcactacctttccaataaccgcttcaatagccttactttttctttcttcagcagttttttcaattttcagacattcacttttagcattagctaagattttatcaacctctgctctactgtcggtgactgccttctcaataagagtttcttccataagctttgcttgttttcttacatcagcaaatatgctttcacatttgtttacagcatcagctctgatagactctgcatcagtaacagcttttactttgatactgtctgctgtctgctctgcctcaacaatgctttttattatttcaaaagccatccaaatcacctctcttacctttttactatgtatataaccaattagatttttttattctaattagattactacctcattgttaaagtataaacagcatttttatataataattaatatttttcaacgtttatttcttaataaaacatattttagaatagtacttgcctagatttacatccttttttgacttacttttagactatgacatgagtatggtttttaaataccattattttcaataattataatttaaagcgatatagtttgtcaatagcgttattttgttttaaaattaacgctatgtcgacattttaaatttttattttattttttttataattttaatttaatttattacatataaaagttttttatattctttttcaacctctaacccttgaagtttattgttttttttgaatttttagaaatatctcgcactattttatctaacttttataaatcatcaagctatatcgatttttgtcaccttattttcaatctaaattttttatatatagttagaaataaatcaatatttttaaagattgataaaacttacacttagttctaatagttttattttaaggcaatgtattaatcttaagtagataatatcattagttactctatatattcgacaacattataaaaaaatcctcgtaccaatcactccaatcttcaataggatatgctgctcctccatttacacttttcagtaggtttgatgtatattcttctcccatggaaaaaagttcccctactgttatatcataacctctagatgtaacaaccttacaaaatgaatccataacatcacgttgttctcttgtttttataagttcctttctaaattcatcatcattcttagcttcttctaaaattttagttaatttttcattcattatgtatttctccttttaagtagtctttctgtaaacttcaataagctttatataaaaaggaagccatcctaaataaactaagatgacttcgcttaactgttagcaacacatttactagtataaaataattggtgtacctggttctatattttcatatattttctttgccttagaaaaaggtgtatttacacatccatgtgaacctgaagacttatatatacctccaccaaaagaatttctccaagtagcatcatgaatgcctatgttcccattaaatggaagccaataacttacaggtgaactgtaaccttgaccagttaatgaaacatttctagccttataattaagaggatatatacctgatggtgtagcaaatcctctagctaaatcgcctgttacaacatctgttgatacaagcatttctccatttttaaagaaccacatatgttggccagaaagactaatctctacatatgtatttccaatatcatctttattacgagatacagctttttgtatgtaaataggttctcttgtaacatttttaccagcttttacaacatcaactaatgcttcagcttctttctttttatctatcaaccaaccataaattccacctgaaattgtaatatctttacctgtggcagttttaaatggtcttgagtcaccaaaagtactgtattttttacttaaacttcttgtatattctaccatagcatcattatcaaaagttatgtcataattcttttctgagtctacttttaaccatttattaatttcagaaccatctaaagtttccttacggtcactaaaatcatatgtaacgactacaccaacatacttatctaatgtcttaatagcttgtttcaacttttctgaatcctttgtgttgtttggtgcttcataaactttactttcatccagagaaatagaagtattcccagaattaattgagttttgtactaacttataaaaatcatcttttttcactttgtttccaagtacctctggtactataacataagcgtttttagtgctatcatacttaggataagcactcttaggttctacaacatttttactatcaaaacaagataaagcattaaaccttttttctagtaaatctttattatatgaaagagttatcatattattatactctttagatttaaatattccaccaatccatccaatagcgctttgactatcttttatcttttgaactttatcatctggtgtaaattttaaatcaatatcttttgcttttatttgttctttcttattgtttctttcctctaagtttaaagtataggaattagtactagatgttaacaaatcatttacttgctcaactgtttttcctgaagcctttacgccattaatagtcgttccaaagtaaaaatgatttctaaaaaagattgccattcctatataagctacaaacaaaacacctacaactatagctatcttaaattttagatttttttgtccactttcttgttttacctcttttccatcaatcataattaaatccttccttacattgtaattacctatgtactttattggtttttaaacaaaaccatgtatgccttattttatatacccaaattactgtatcattgtttatatttttaaatatatagttatttccataaaaccattttatcttttagacaaaatgactattataaatcacccctttcaaaatcccttaaatacaatctctgctatattaatatattaccatacttttaataatcgtgggttatctatctgtttttgtaacactaaactactcttttaaaaaagaaactaattttatgttagtttctttatcttaacttatttttatattgaattttagcttaacataacgttgttatatagattctatttaattattttagtttctatatcttttccatcagcatattctttaagtaactccttagcatatccaaaatattcttcaatatcagattcttgactaaaagaaaatatacaaattaatatttcatttgcatcttctgttatcattgctctttcagaatcactagttggactcccaaatttacccactgaatcagacaatataggaagattttctatatttattaattctttcccaatacccttatactgttctccttcatctcctacagtaaaacatactggtgaatgtaatttgcttacattatatgtacctactggatataatgattttattgatattaaattgtttatttctactatattatttattgtataaagacccttcccttgaataattcttctaaccaatgcttctgaagatgttctatatctacttggattttttccaagctctttataagcatttcttgcatctttaattttatctagtttcgtaatgtcttcaacttttagactttgatttatagtatcacaaaactcatttatttcattaattaatttttctgagcttttatttactgctacttttgcttgaatgcaacccaacttagcattaggccatctttccttaagtttgtcatcaatactcacatctatcatacttaaacaactcctatacactaaatttttattaaagtttttatcatctatacattatagtactattcttttgttaataacatgtttattagcaaaataaatttatttttaatataatttttataaaatacaattattttttgctttatattaaacaatacattgataaaataaaaaaacactaattatttagcagtgatttattaaaatcaaacattcataatagtgctttatataaaaattaaattttgttttaaagtaaatctaaaaaattcttagctggcattggtcgtgcaaaataaaatccttgaactaaatcacatccaaattgtttcattaactcagcttgttctttactctcaacaccttctataattacaactaaatctagtgattttgctagagacactattgattttgctatattgcgacttctctcatcatgttcaataccattaagaaaagacttatctagtttcaatatatcaattggcatatctcttaaacaactaatagaagaatatcctgtaccaaagtcatccatagaaatagaaaatccatacttcctcaactcatttaaaacattctttaaaatatttaactcattaatagccacagtttctgttatctctatttcaattaaatctgaacttagattatacatttgtattgttttattgataaattttacaatatctggttgatacaactcaactctagataaatttattgaaactggaactatctttttaccttgctttttccattcagataaatcattgcaaaccctttcaaatacaaatctcccaatttttaaaatcaacttacttttctctgctattggaataaatactgcgggacttataaaaccatgttctggatgattccatcttattagtgcttcactccctatcatttctccagttacaagtgaaaacttaggttgataatacacttcaaattgattttttaccaatgctatttttatatcatctaaaatcattgattcttcactaagcttattcctaacatcttcattataaatagcataatttatatttttacctttagcaacagacctagccatatttgctttatttacagccttttggatatctacttcaccttcttcaacaaaataaatacccacacacagagaaatttcaaatactatactcaaattactttcaatattatttcgtatactatcaatttttcttatacgtttattttttccatttttataatcacagaaaattgcaaaataatcacttgaaagtcgtgcatatacttcaccttctgttaattcttcttttaaagcttttgctatcgtaattaataaattgtcaccaaattcatatccaaaagtatcattaatcatcttaaagttattaatatcaaaatatactataatataatttaaagatggtttatctaaaagatacttactacactctctataaaatttattttgatttcctatatgggtaactttatcttcataagccaaacttaatatttctttttcattggatttttttatataaattatataaaaaataattgcaataaatattaatataataaataacactgcatatatagctctgttgattatttgttctgaattactaaatacaacagtttctggaattgaaaaaatcaaattccaatcttttatataattattttcactattcccattatccatagtagcatatcctaaatatcttctttcttccaacatatttaatacagttgcacctgttttattttcttgcaattctttttttaatctatttatttctcgaatatcattatcctgttttaacaatttataaatattttttgataggctatcctcttgcggatgaaggataattgtaccatcatttcttacaacataagatatactattattttcataaaaagatacattaataagtttcatcagagtattgatattgtaagtacaatataaaactccaactactttatcattatttaataatggtactgaaatagtaatcttctttatagacttatttacttcatcaacatatggacttgaaacatacttcttacctttaattgagtttttgaaaaattctctatctttcactgaaaacttatcacctttggtattttcagcattaccatttatatcaactattgccatagtgtaaaatttttgattttccatttcatctaaaagatttttcattttttcctcattaggtatatcttgatttaaagcataatagttagaaaaaatatttaaaacatctaaatctttttcaatttgtctttgtgctagttgagagccttgtactgcaacttcttttatatgtatttttgcctctgacataagaagatgttttgtatcttctatatagatataccccattgtcaaaaataatgatgttaaaaaaagaattgtaattaatgtaaaacttttatttctccctgtcattcgactcctcccctaattagtcaatacttcatatagataatatatcctttttataccgattcatcatttatattgtatataactattcttaaatgttacacataaaatcaacctaataaccataaaaacattcttttattatcataataacactatttagttgaattttaaattaaagaataaaaactatcaatttttctaaacaaaaaaactcttatacaataaaactttgttttatgtataagagtttttattttatctattttatagtaaatttatcttccataatatgaatttaaatacatatcttttatttcattcataagtggatatcttggatttgctcctgtacattggtcatcaaatgcttgaatcaccatttcatctattgaatccataaacttaggttcttcaactccaaactcttttatagatttaggaataccaactttaagttttaaatcttcaatagctaccaataaactttggaatttctcttcatcagaatttccctttaatcctaaaaatgaagctatttcagcatatctttttaatgcttctggatatttatattgagagaatgctcccattttctttggtgcatctgaagaattaaatttcataacttctgttatcaaaagagcatttgcaacaccatgtggtacatggtggaaagcacctaatttatgagccatagagtgacaaacacccaaaaatgcatttgcaaaagccatacctgccattgtagaagcatttgccattttttctctagcttctgggtcttttgcaccattatcatatgcacgtggaagatattcaaatatactcttaatggcttgtaaagctaatccatttgtataatcagttgcaagcatagatacatatgcttctaatgcatgagttaatgcatctataccagaagcagatgttaagctttttggcatattcatcatcatatcagaatcaactatagccatatttggcatcagttcataatctgctaatggatattttacccctgtatcttggtcagttataacagcaaatggtgttacttctgaaccagtacctgctgatgttggtatagctacaaaattagctttttcacccattttagggaatgtatataccctttttcttatatccataaatctcatagctaggtcttggaaatctacatctggatgctcatacaatgtccacattatctttcctgcatccattgcacttcctccacctatagatattattacatctggattaaattctctcatagctttagcgcctatcttagcacattccaaagttgggtctggttctacttcaaagaatgtagtgtgcttaatattcatttcatctaataaatcagtaactgctttagtatatccattattgtaaaggaatgtatctgttacaataaaagctctcttcttattcattacatctttaagttcttttaatgctacccctaaacaaccttttttgaaataaacttttcctggtgatctaaaccaaagcatattttctctcctctcagctactgttttaatattaagtaaatgcttaactcctacattttcagatactgaatttccaccccaagacccacatcctaaagtaagagaaggagctagtttaaaattatataagtcccctataccaccttgagaagaaggagtattaattaaaattctacaagttttcatggctgaagtaaacttatcaagtttttctctttgatttacatcatcaatatataatgaagatgtatgcccaaatccaccatcttctactaatttttctgcttttctaactgcattatcaaaatcactggccttgtacattgcaagtactggtgaaagtttctcatgagcaaaagcttcttctatttcaactgattctacttcacctattaaaaccttagtatctactgggacttcaaagcctgcaagttttgctatagtacaagctgtttgcccaactattttagaatttaatcctccatttactaaaattatatttcttattttttctgtttcatctttatctaataaataagcaccacgctctttaaattcttttttgacttcattgtatatattttctaatactataaccgattgttcagaagcacatatcataccattgtcaaaagtcttagatacaagaattgagtttacagcagtttttatatctgcactctcatcaattattgctggagtattacctgcaccaactccaatagctggttttccagatgaatatgctgatttaaccattccaggacctcctgtagcaagggtcaaatccacttctttcataacagttgtagttaattctaaagatggctcatctatccatcctattatgccttcaggagctccagctaaaacagcagcctcaagaacaacttttgcagcctctatagtagaattttttgctcttggatgcggagagaaaattattccatttctagtttttaaagctaaaagtgctttaaagatagcagtagaagttggattagttgtaggtacaactgctgcaataacacctattggctcagcaattttagtcataccaaatgcttcgtctttctctataacaccacaagttttagtttctttatatgcattatatatatactctgaggcataatgattctttataaccttatcttcagcaattcccataccagtttccttttgtgccattatagctagaggaactctttgcttattagctgccaaagatgctgctaaaaaaattttatctacctgctcttgagtatatgtagcaaatattttttgagcttctctgatttttgctagttttttaactaagctttcaacgttatttacagtatctaaaccaactgacataacttcattttcttttttattttctattattacttgttctttatgagccattttaacaacctcctgagatagttttttatttattatgttaatttattaacattatagcatttactttttctattttcaagttatttttttaacattttattttttatctaatataacatcatttctactaataatatctagctttacaaatacttaatttaactagatatcactttattttttacgcaaatcactaataaaatcatctaaaaacttaaggataacgttatttttttaacgtttatatttttgtattttttgcaaataaaactttataaaaagaatttttaatatgatattctatcaagtttaaaaataaaaatacttgaaaatgaaaataataacttgattaacaagttaaagtaaatatagttaaatgtacaaacatttacaacatatagtataattaaaaaaatatatattcatgatttttatatactatgaaataaaatatatttaatattatatagataaatttgaagtttataagaaggaggataagcatgaaaaaattaaaaacaattagcattttttctttgattataagtgtaattttaacgattggaggtattggaatagtaacttattatgtagataatttgtttattagaggactatcagtatttgttttaattatgtcctcttcttttgtatcaacaacagttagattgatatttgaagagtcaaaacgatataaattctaatttaaaaattggattaagtaaataattttaatataccaaaaattacggagattagctcaaaatagactttttagttcatgatgcatttttttgtatgaaattaaatatattttcatcatttcaacaatgaaaaagaggcttctctctattttgagacagcctctttgctagtattgtatctaatacataatattataagaaccaattctattgatgtggactttttataacaggctgtagctgtttgttctctagagcaagttctatagttggaattattagctcagtatgtgcaatcatagaattaggctttgctttgcaattatcttgaccaaaaggtacaaaatatatatttttagaattaaggagaataccaatatttttgaaattaaagcttagagcatcattcgttgatattgatattactagtggtttatcattacgaagatgaccttttgctgccattaatactggtgaatctgtaataccatttgctaattttgcagcagtatttccagtacaaggagctattattataatatcagcaatccctttaggtccaaatggttctgcctcttcaatcgtaactataggtttatttcctgtaagttcatatgcttttttcataaactcttcagaatttccaaatctacaatcgatattttgtgatacatctgaaaatatagtgtgtacattagctccttctttaaccaaattctctaactctataaatattttatcataagtacaaaacgaaccagtaaatcctactccaattgtaagtccttcaagtctcatttctaatcccttctttcatttataatattttctatagcgttaacaagaatctcaccagatgtctttggtgaatatttaccaggaagcccaaggcaaagagtcgcattaatccctacttctttaacaacagaataatctactcctccaggagaagaagctatatctataatagttacttcttgtgatactttttctaatctttctttcgttaaaatacactctggtatggtgttaaaaatataatcaaattgtaaaagtttttcatcaagttgacttaaagaaatactggaatatccaaatgcattagccgtacttcttgcatcattatttcttgcaccaacgcatacatttgcatccaaagcgtataatttttttgcaagtatttgtgcacatcttccataacctaatactaaacagttactttgatgtatattgattatacttcttttaatagcttctgctatagccccttcagctgtagcaactgcatttaaaatagcaacatcattcattttcataaaatcataaatctgaatagagtgttgctcgcaaaatttacaaactttagttggtatgttacctccaaataatatttgattaggagataaattaattagcaagttatcaatagtagcatcaagacaatcatccgtattttcaatattaacttgattctttgtaaatggaattggacataaaataatggaacttttggatagtgcttcagctagtgaagttgattttccaacgattccatttataatttcatttgatatcccataagtgactacagaataccctttattaattagtttttttaccatgtacacttgtcgcaggtctcccccaataacagttatatcgtattgatttgacatattgtaagcctcctttactatatacaatatgtttttatcaatacattggttcactaaaattactaaatattatacttataacatttttaataatgctaatctatctatcttttcagaagaggtatatggaaatgaatttaaaaagataattttctttgggatttcatttttcattagattatctttcattttaatcaacaaatctttcttcgtaattttgtctatagttattacaaataatacaatttgatttcctcttatagtgtctgagtacggcaatacaattgcatcttcaatttgaggaatttttttaacttcattttcaatcttagcagaactaactttaaatcctccaatatttacaatgtcatcacttcttccttcaaatattaagtatccatcattatcataatatccaatatcattgacagaataaggtttggttgcattatatactgcatattctgtattcacaaaaatttttcctcctctaatatatatatctattcctggaaatggtctgcctacacttagaggtttttcaattagttcatcatagcataaatatgtaatataatttaattcacttgccccatagtataaaataatttcagactttggcatatatttttttagatttcttgcagtatattcaaataataattgagaccctgtaaaaatacttactactttgagtactggttcttttaagtgtttaaccaaaagttgaagttttgtaggtataaggtatatgttagttacattatattgttttattgtccttatccatgatttacaattaagacctgaacttattacaatactacctccttcatataatactgacattatagaatttagattccctgtaaaactaagtgttccattaacaaacaagattgattccccagagatattaaaaataccattttgtataggaaaaaatccagcccaactctcatatgttctatataatacctttggaacacttgtagaacctgaagataaagctcccatacaaatacttttatctaaataatttataaggttcttatattgatacatatatagattaaatttaggattaaaaatagaaaaattaactttttttgctacttcattattgttatcatcatataaatcaataacgtccatagattcatcagatataatgattgaaatattattttttaataaaatatcatctaatacttttttagaaagattataatgacaaataataggaatattttttgaataattaatagcaaaaaaactaatcaactgaaacattatatttttagaatatattaaaattgagatattttcacctaaagaaatttgttttcctagttgctcactataacttaatatattttcataagtatatttttctccatctataattaaaaaatttttatttttatgcctctctttttttattcttaaaagttcataatagttcataatctacaccctttcaagcagtaaagctgaacctagaccaccagctgcagctatagagcaaattccatatctacccttagttttttctaatgcttttaaaagatgtaatgtaataattgcacctgaagcaccatatggatgtccatacgctaaagctccaccaaatatattatatctctctattaactctggatactttctttgaaacaacacatctataactgcaaatgcttcattaaattcaacagcagatacatctaaataattaaggctttctatctctaaaagtttatccattgcttgtatcgctgatgttggacttaaggttgcatctgttcctattgtgcatgtattaataatttttgttttaggcttcttttttacatgttctaaatacttcttagaacatattataataaatgaagctccatcattaataagacatgaatttgctgcatttgtaatagtttcttttcctaaaattggtggcatcctatctaataacctttgactcatcttatcacgtataccttcatcataggtactattatttataggagatataatatcctcaagtattttttcttctcttgcttcttttgctcttttatgactttcctttacccaaaaatccaagtctgctctctcaatttgatataactctgctactctttccgccccttcgagcatactattttgactattatcatcaggagaaaattgagcaactgtataatttggattatttgtattatatcgcttatcattcttatgatatgtgcgcattggttgtagagaactactttcaaaaccacctgcaataattaaattacactgaccagatttaacctttgaaaaagctatgtctatactcatcatagcagaagcacactgcatatccacagtaaaagcaggtacttcatttgacactcctgctgttaaagtcattaatctggctatattccctcctgtcccaactgcatttccacatataatctcatcaattttgtcaatttcatactttttaattaaatcttttaaaacacttgctcctagtaattcaggttgaacaaattgaaaaattccattttttagacctatatgacttctcaatcctcctaatataaaaacttccttcatacattacacccttccttatattatagatttatcatagatttcttctgagtacattgttcagtttagtgcctaaaaaagatgcaataaccgactttattgtatctccaattaaaaatggtactactgctgcaaaaagtgctgcttctactgtcatttgattaaaatagcacataaatactgttcccataaaatatataataggcattccaacaaaaattgttattagtatatatctcttaatatcattatttcgtccttttaataaactaataattagtgctgcaaacaaaaacccaaaataaaaaccacctgttgggcttaacaactttccaataccagatgtacctccaccaaatactggaatcccaattaaacctatcattatatatacaccaactgtactaaatgcttgtcttggtgttaaaatcaaagctatcaaatttatcattattgtttgtgctgttactcctgctggagtaaatggcaatggtatatatatgtaagatgatatacacaataatgctacacatattgacattttagttaaatcttgaatatttactttagtatttttcatttttataattcccttcatatgtcttatttcatttagtttatatgtacatatacaaagcctctattaaagctttgttttagtataaaataaagacgtttttttgtcaaccattacaagtatttaggtttacgtttaatttataagtaaactttatactgttactttatattttaatagtcatttataaaactttgcttaaaaacagctctatttagactatacttgtaaattataatatgatatatttttatataagattttattttatataaaaaatagtaacaaatagtttatacacaagatatttaaaaggaagtgatgatatgaaagttaatgaaaataatataaataatatagatgaagagttagatgaacttagtaggaaagtttacttagagtcaccagatttttggataagtatttctgacaaaataatagataaagtatttgatgaaatgttattattttttgcagttaaatataactatttcaatatagtatgctttgctattgaaaacaattatctggatttaaacatgccttcaaaaaacaaaaaatacactaatataatggagcatttgttagatacatcaaaacagaatgaagataaaaaaatttataattatcttctaagcttaaataaaggtaataacctagatgaaagaccaattttagatgaattaaactgtaatattagtagtgatacttttgaaaaaaaagatatatatcttccaaagtacttatgtccaagttgtaattctaatatatttgatacaggttataaagtatcaaatgacataacatataaattttcttctaaagaagctgaacctattgaaatgtctagtgaagtttcttctatcagatgttgtaattgtgatgaattattagaagatattacacttaataaactatataacctatgtaaaattcaaaactgtaataattgtggttctaatttaactaaggtaggaattattgcaaagaaaaaaatgaactttgatgagaatactgaaaaatttaaagatgtctcaacatcttactgttgtggaaattgtgactctgaaataaacttatctcaaagagaacattttaagatttaaatatttataggctaaagtaataagattacattattagatactgtataagttttttaaatctgtaaaaataaatacacttataagaattaaaattgctatgaaactagttcttgctgaactaatttcatggcaattttctataatctaataattattaaattttaacaaacctttattagcattccataattattcaaaattctttcaaataccctatagtttataggtgaaagtatctttaatattatatcaaacttattatctttaaatagtaaatttgttaaatctgaaatacaccatacaattttattttcctcttttgtagctatatcaattctgattaacttacatctataataaatatctttatcttcatatagtctattttaaaaattactcttataaaaatcaaatagaaaataaattaattattcttttaatagaatgtaatcatattatttactatattccattatgtactctttaaatcctgaatcttcatttacttgttcttttactatattaaaaccttttttattataaaacacaactgcttttttattatctttatatactgctaaacttagacttttatattttttagttgcataatctaaaagtttacctccgatacctagattttggtatttgggttctataaataaagctcctataaagcttttatctattatgcttataaatccttttatttcatctccatcatcatatacaaatgtatctgatataggtatatattcgtttttaacagtattgtagttattttgccagtattctttacttataaagtcatgtgctttgattgtacttttttcccatatttccatgattttatttatgtctttattgtttaatttctttatcataaattttgtttcacctcatttttgtattgattttataatgtttataggtaagtgcattttatttagatatgatttagttaatataaggtggatgttttagtatatgctattgtttattctacaattttatatactgctttattaatataaaataagtttctaaatactcgttgatattgctaatattctacttatctaccacttagttgatataaaacctgacactgtgtcttgtgtgagtcttttctttatcctatttacataccacttagttaatataaaacgattaagcccagtaaaaagactcgaatctcttatcgcatttacataccacttagttaatataaaacgcaaaaaatgttgatattcccaaaattaatattgatgaatttacataccacttagttaatataaaacattatagaagtacatatattgctgaaaaacctcttgtatttacataccacttagttaatataaaacagttagtgatatcaatatgctaagcaatatttttacaatttacataccacttagttaatataaaactttatatttcgtcgcacggattcgtgcgaagggttggatttacataccacttagttaatataaaactaatttagttatatccatttgtttaacccaattagtatttacataccacttagttaatataaaacgtttcattttgcactatatcaagcttagtatacaatgatttacataccacttagttaatataaaacttttatatttaattttaaagattaaaggtataaacaaatttacataccacttagttaatataaaactactagaattattaaatgaaatgaacaataatattgtatttacataccacttagttaatataaaacgatttaaatgcaacacaaattataacatctaagaatatttacataccacttagttaatataaaacaagattgaaatttcaacactttcaccttgtatatctatttacataccacttagttaatataaaacaggttaaaaagcaatataaaagattgcatggaattactatttacataccacttagttaatataaaacaagtctcaataacaacagtcgaagcagaaaaatccggatttacataccacttagttaatataaaacgtaaaatgagaaataaaagtaaacaaaaaggtttagtatttacataccacttagttaatataaaacctgaaaccctcggatttagtaaccgattctatgtcgagtctatttacataccacttagttaatataaaacaatctaaaatatgttcgttaaaagggagtgtgtaattaatttacataccacttagttaatataaaacgtttcttatacaactcttaactccaagcccattttggaatttacataccacttagttaatataaaacgtataaaaaaagagttagaagcattagacaaatggaatttacataccacttagttaatataaaactataattgggatggtcaggtttctgataaggttaataaatttacataccacttagttaatataaaactgttttttagttttcgtgattcaaatggttctttgttatttacataccacttagttaatataaaacaactcatgtaacaagtattaagacttgcacctttaaatttacataccacttagttaatataaaaccccaaaataggtataattgaatacattgaaaatacttcaatcaagcaattataattcaataaaaacatcaaaatttgcagtgagcgagcagtagtgcaattgataacagttatcatacaccttcaatcccttatattccaactgttaacacctattttagcataaatatcgctcactgcaaacctatataaacatttcatcagaatacttatcaatcccataacatttctttttaattgaattaggattttttatctcataaacatagattgaatcctcgctattatcaataatattttctatttcagaaatacatttatgtaactttccatcagtaatattgccttcaaaaacagaattttgcgtccaagtcaaatattttctaagtatccttctaattctatttaacgaccttgcttcaacaatatcataagtaacaataacaaacatacttaccaccacacctttaaaactttgtacctttcatcatttataaaatgtttaattaatttataacactctaaccttataaacattctatatgaaacttttctatttagatttctatgttttatagttgtctgcatcttattttcaaattcttgcaaaaatttcttctttcctttttcacttaaataacaaattttgtcttgatattcaaaatcattcttattaattcttttattattaatcaggctaaaaattattgtgtcaactataattggcttaaaaatttctgcaatatctaaacttaaagaaaatctctttgttgatggttcatgtaaaaagcttattgtagggtcaagttgtgtcttatatatctcacttaaaacattcgtatacattatgctatttccaaaagacataagagtatttactgggtctttgggaggtcttttttctcttttataaaattcaaaatcatcttttaatatttgattaaatgatttatagtatgtttttcttattctgccttctttacccataagttctgatatttctttgacatcattcaaatcatttagttcatcctttatagtatcaattaaactttcatcaactttgtaatatctcatatttcttaaaatatggtatgatgcactttccacaaaggattttgctaagtataatctttcatttttatctaaatagcaggctgattgacatactaaactgaatcctgatacatttttcttccttggataatatgtacctgaataatatccatagtaattgtagaaatgaagcatcaccccatatttacttatgtaatttataagttttgtgtttaaatctacttctccatatatatgaatatcatcaacttgttctactggtaatatttttttctcaccttctaaattgtaatagtaaatcgtattttctttcctttttatatttccattacttataatataatagtctttatacattgttactcctccttcacaaaacaaaattcataataagcacattttgtacaataatgttttttctcaattttgggaggagataactgcatatttatttcatttatatttataagtgtgttttcaataattttttctttttcttctgtcaatatcaattcttcttgtttcttttccttaacataatttatagttccttttttctctatacccatactattctttaaatagtataagtaatagtataactgcatttcatctgcttctttcatctttgaacttatttttacttcttttacatactcgtcctttattatatctagcttcaagatatcatcaatcaacatttctttatttttcattcttttatatgaatcttcatgtactatctttccagacaatactctactactattttgttccatagttattcctttagaaaatagccatagttttcttttacatacataataataatttatttttacgccttgaacttttaatacttctaaatctattggcacaaaatcaccttctttagtaaattttagccacattgttaatataaaaatcaaataaattggtctatttcattacttataagcacacctttaccaaatatctgttttgtatgcttattttcgtgtatatcatatttatataaaagtatttttaaatcttcaagacctttcacctgtatgtcaattacattttgtttagctttatatattggtaaatttacagtttttttaattatctctcttcttgctttttttctcttagactttattttatttatcaattgtctatcatcattactatatgcatttataagctcttgtcccaactcttcataatctttgattaaagtttcttcaattttattatatatatcctctggaattactgtatatccttcaatatttctaagtatattttgtgcatctttagaacctaaactatatggcgttatagtatctaaaatatttaaagcactggtaaatctcttttcaaaagctgtaccttctagactttctttagagtatagtatcttaaccatttctaccttatatttttctttcatcttcacacattcttttccatttataaaagttttcagtagctcaagtcctttttctacaatatccttatcataaatactacctattcctgtagctttttctgtatatataaatatatttgggctattttcttcatactcacgacttctataacatctaccaaatcgttgaaatagactgtcaagtgttgaattttctgtatgaagctcatcaaaatcaatatcaagggatgcttccactaattgtgtagtaatccaaataccattactatcactatctgcaaattcttttatatatttttctaattttgctctatcttcttgtatatacatagaatgtaaaagatttaagttgacatctattccttttggtttaactatttcttctattaactcatatttttctacagcacttttaactgtatttactattacaagaacttttttattcattccactttgtattattttacctaagttttcatctattgaattttctacaatagacacacaatgtcttattttttctgtgttacatgtcaagtcagctaagttactattcattacacctcttttttttaattcatctatatatatggttggcatagtagctgtcattatcataaatctgccacctatcttatgtatcatttctataccttttaccaatacagctgctatttctggtgaatatgcttgtatctcatctattactacttttgaatatgctaatgttgagtacactttttcatagcctctatacaaaaaaggaaatttaaatatttggtctattgtggaaaatgtcagtttacaagataataactttgctaaatctacaatctcacttgaattttcctgattactttcttctaaataatctattgctgttgaatgtaacagacctaagaatgtatcatttgcttctcctactccaattatatttttagccctatcaaataatgcatttatacttactcttaatggtagtgtaaaaaatgctttatccttatctatccaaatcaaagcagtttctgtttttcccattcctgtagatgcaatcagtattatattcttatttctattagatttagcaaatgattgagcctctctcaaactaccaaactctttcattaaataattttctgtctgttctcctatatttataacattattgcattccacaacttcatgagcagaagcactatggtctagtctatgtagtattccttttaacataatatataaattatagtacttgtgatttttatctattcttttttctacactttgtagatatactttactcaatttttctgtttttattggatatctaactttaaattcacgctgtagttcataaactttatttattaaatcttcatctaatattttttgtattaaatttttaaaatctttatctataaagatatctctttcatgatgatatacaataacttgatttaatactgctctaagttctttattttttttcctgtctatataactataatcaataaatgcaggagaaagataattatggcctacattattttctaaatgagttactattttaggttcatttattttagtatccattctgctttttattaactcttgaaacggtgaaaatgcttttccaatatcatgaaattctataacaaagtcaagtaattgccaaaatatctcttcctctagaaaatctaagctatttatattttttccataactttctcttaatacattcatttgttttaaaagttcatcagtatgttctctaagtgtttccactggattagatttagcatataacatactctccctcctaatttatattattaaaatataataaatctccttcattatctaataatatatctccaattgatatagtatttccatcctcaacataataactatctaccttattccaaaccctttttttatcttccacagcattattatcatagtaattattgagtctgtaacttataccatctatatctgtatcttgtaaacttgtttttggtatatatataggcattcttatattacattctgataacttataattttcataatcatctaattgtatatcctcatctacttcaaatttattgacttctacaaatctaatatcattaattcttactaaatcttcttttctacctaatgataagtgctcgtcataatttaataaactatcatatatttcttccaataaatcaaaatccccacctatatgaattatcaaatttacattcaatagcatatgactattcattggcatagatgtaatactatcttttttataaaaatatgttgtctggtaattattaaatatactttcatatgttccctgtacacttatattaaatggtatatattctgtagcatttaatattttgtgaattaatccatttattgtagaatatggaggcagtggatatgtctctgtaatcttcatagcaaatggttttttatagcatgcagtttcttgaaataaatctaatttcaaaaccttcatattaattcaccccataatattcctttacttctttaactagttgtccaaaaaatttatctacacttaaaaaattatcttcaaacaatcccttaaattcttctttatttataaataccccatctaccattccaacataggtaaattcttttaaatcttttcctaaaaaagtaccttgaattacttcttctatagcttgcttatttattttaaatccatttttatctccttttaatttaattctacccaagaaaaatggatttgctatttcatatactcctcctactacaaatagaggagataaattttcttgtctacctctaatatttctattcaatacttttattatttctaaaaattctactactcttctacatttctctttattatcaagttctatatctccatccttacctattttagataaatctatagtcactgtatatgtataataacttaaatgttgctctatgttagcaagattaggatgttctcctattctatctgctaatcctttattatttaaaaagtccatgtcacttctatatggctcaagggaaattgcattacttaatcttacagtagcttctctagtcaaagaacctccttttttatctttctcatcttttttatttgttttcatatatccaaataaatccatttcttctgattctcttatacttatattgtctttaaattgaatagtacctttttctttatcgacaacctgtaaattccaattaaacaattctgctgctaatcgtactatgtcatatcttaaacactggcgagatgcaaatgtatatatatttccatcatctctacttaatttttttaattctgatatattacctatcccttccccatagtttaaactttgagcctgtgctattactgtaaatgttaaccctcttttcatcttatttttcctccttttcgtttggtagtttgtcttttccttcatattttccagaaattaatccagatataaaagcatgacctatagattcaaagtctaaatctttttcaatttctatatctaaaataaatgctggaatctgtttttcagctgacataaaaactcttataattgtatccataaaatcacttttatttccgactttaactgaatttaaaagtttatagcttactccatctattttatttttagaatttttattaacaaaatagtcatgtatatcacaacctaaataataaattattctcagcttttcatcattcttctccaaatttttactatccattttatataccccctttttgtagctatttattaatgctcttaattggactactctaaaacaatctattcctgatatatttgatttgttgttgctttccatatcatttttaactttatttcttaaaatgttattagttagatgcttcaagtccctatttttcaagagtaaatctagtacatttgatttaagcttgtaatcatagatactttgtatttttttatttgcatacttgtctgtaaaaaattttgctaaataagttggaatattaaaataatttattttacattttttagaatctatacttgctttaaattccacaaaaagtatattacgaagttgccattcactttttaatgtattttcttctactatactttttataagctgattaaaaggattttcatctttggaatctgaatattcacttttttgagcttttaaactattatttctttcaaaaagctcatttatagaagtatccatgttaacaaataaataaaactcattttcttcattaattaaataattctttcttgtataagtagcccctgctggagtacagaacaatattagcttacaaatatcacatattgatggtacatacgcctgattccaaaacatattcctagcattattggtgcttactccaagtggagcaaaattactttctgagtattcatctaatattcccttatataaaccacacatttcacatacttctaaactatccatatactcttttatatcttctatgcttttatttttctttataaagtttttatttatttccttcataattttttctatagtatttatactagacttactaacttttttttcatttatatccttagctatactatttaatctatcatttaaatagtttttcaacttatcatagtcattctcttctaataaatctgctaactctccaaaatatataatttgtcttaaataatcattaaacattatctgttttaatccatctaaatctaatttcgccttagcaacattaaaaaaactaacttgtccaaaataattatcttgaactacatatttataaagatttgctgtaagcctgtcatttattgattttattttaaatatatctatagtctcatctactaaagcttctaaactgtcaaattcatcataactttttatcttagacatgctatctagcttctcttttatcaggttaaatttttcttcatcaaattttttaatcttatcattttgttgtttcacactatctttaattttcttaattccatctttgattctatcaggcttagatttaataaaatttatactgtaatcaatattttttttaattctttttgatacatcatattcatccataaagtaattaaaataatactcatgaaagttttcaagaaataagctatcaaattcgatataatcttccataataaatatttcagcttgtttatctgctttctttattatatttaaaaatccaactatacccatattaaaaaaccaatctcctctataaactcttaacttcatttatctcacctccattctaaaatatctacatctccaaatccctgagcacgtctaaaaccaattcctagattgtagataagatttaaatcatcaatatcacctttcaatataaatttacctttgtaaccattaatatattgatactctttacctgttatttttttaaattctcttaagctctctttaactactatctttttgagacctatattttcaaattctaactttctttttaatccatttcccctataatttttaaccacttcattagttatatagtttagttcttctatgtatctatcatcagttatctccaagaattttccttctttagactttacacagattggagacaatgcattaaatagtaccctttcttctgttaccttcttttctcttgataaatcgattctaattcttgtaagttcataggctttatataaacattttttagaagtcattaacccattgtatatatgaaaacccaattctaaatctggagtacttatatttaatattactttatcttctataataaaattgtcaccttcaatactatacttttttatataaaccgaaaatgtaaaatttttagtttttttattattcttttctttataatagtacatgtttttatagtaatcttcattagattttcttattgcttcttttataatactcataaagagcgaattataagatattggtatacaacctgtactaaattcaattttcattttcataatatcacctctctcaattaatatattaacactagaccgtgaagtatattggtccaagtataaattatttgaaaaaatcagtaaatttttttcattttttcaatctctgacaatatatcatttctaagtctatctggttctacaacctcaacataagctcccatacttaaaatccaactttttatctcctcataacctctcattttagctttaaacattatagatttatcatcatattctatgatttgttgattattaacccaaactttttcctttataattattgaaaatggatgactaatttttataacaacattaatttcttctcctttataaattcctatactatttttactatattcatcccaactaaaacttttatctacattatatttttcttctaaaaccttataatctttaattctacataatttaaagtctataaacttaaatcttttttcacaaaaagctaccatataagtatctgatttataattaaataaaccatatggatgaacaattctttcactatttcctgaatttaatgaataatattctatccaaaatttgtgttttgtggtatatgctctaattatttcattacacttatttttttcagacttataatcacaattacgttgtgcttgaactgtaaaataatccatatatgtatcgcttttttctcctgtatttaatactgcttttattttttctacaatattattaaattcatttttgtaaatatcattattatactctaactgtgaatttatcatatctagaattgaaacttcactatctaataatttaattaatgatatgctattacatttatctatttcataaccaccataaatcccaggtgttgaatttataaatataccagcttgctctaaatacatcttgtaactttttatttgcctttcacttacttccaactcttctgataattctttgcatttcattttgcctctgctttgaattaatatcatcattctaagtgtattagctaatttactaatgagtaaccccccctaataacattaattgatatttttattatttatttctacacatatgtacatataacctctttatattttatataagtagaatttttttataattttgacatttaccatattatattttatatttgtacaaaattttaatagttaatacaataaaaaatattactgaaaaaataaacatctataattccagtaatattaattaattttaaaccctttttattatcatttaataatagtaactaaaaattgactaaatttaaccttatctcttttaaataattatttcttacaattaaaaaataaactatttgaaccaagaacaagcttcccattaccaaaacagctgatgatgctacttctatatcaaaagaatttttcagtgcagtaagggcaaatattgaatgtataacagccactacataaggaaacaaaaatactattccaatctcaattgttgaagcttttttaatctcattatatgtcatccccaatttatttaattgctcatactttttcttatcaacttggcaatccatataaaatttattatataaaaaactacttgtagtaacaaagaaaattaaacctataaatattgctaaaaatataaatgtagaatatattaatttcccagttcctatcattaattctttagagaaaaacaaatatggttgcatccctgactcattattaaatttattttcaaattctctgcatatctctatagttttacttgaatcctctacttcaaatgcagtaaatctatccactataaattttgattctatactatcataaaaattatcctttaccacatacatatttttgtaatatgctggcataacacattcttccacttgttttgccacctttaaacctctattccctacaataatattttctttgacgttattatttcctggtaaacttgatgataataatgatatgcattcattatcttcaaaacttataggcttaacccctatagtttctgtaatttctaagtacttagattctttcataattctgacattaaaatcacttttcttgggaaatacagttttaaattcaccattagtccttgtatagtctacattctctttttttagattattttctataaacatcattctttccttgtctttttctttgctatcaggctttttagggtcattatgcaatgtcattgttgaataatatattgtgttaggatatattaaattaatttgacgctctacatctttccaaaaggaataaactgtacctatagcagtaaatgctactgcagaagttatagttatcaagaaaaatattctagcattatcctttaccttataaatcaagttcgaaatccaaagcatatttgtattttttctataaaatctcttgtttagttttagcttcttcataaaaaatacactaaattgagaaaagaacaagtaagttgctactatagtaagggatgtaactggaactaagcgcagatatgttgtatattggtcggttgaggtaatagcattataatacgctattataaacaaacaaatacttaatatagcaagcattagtgatgttttaggctctggttttggagtttttgtacctttaagtaacttcaacacctgattttctttaactataaaataagtaaatattgatgttaatacagctaaaatcataaaatagattaaagtagacaatatcgcattaaatggtatatagaattttaatggcgataattctaaaaaagtagacataaccactaaaaatatctttgcaaagattaagcctattattattccaattacagaagatactatatttattatcatattttctataaagattaatttcattacttggcgttttgatatacctgtaatataaagtattccaaattctttatatctacttttaagaaacacactaactgaataaaacacaaagaagaataagaatagatatgcaattatcttactcatcttgagaccttcttttaaataatcaggaaattgagatacatctaaatctggatgacttgtaaacataataaaagaaaatagcagtgaagatgatataacaatacttgctaagtatcctaaatacgctttaatatttcttgaaatattgttaatagcaaactgttttatattcattagttatcgcctcccaataatgtaagtacatccattatctcttgataaaactgctctctactactacccttatatatttcattatatatagacccatcttttatgaataagattctactacagtagctcgctgctaatgggtcatgagttaccatcatagtagtaactttattttctttatttatcttttgaaatagctccattacaacctttgatgactttgaatctaaattacctgttggttcatctgctaaaagtattgatggattgttaatcaatgctctagcaatagcagtcctctgagcttgaccacctgatacttcaaaagttctttttcctaataaatcttttatacctaatattgtagatacttcattcaatctctcatcttgctcttttacactgaccttatctaatgtcaatggcaatactatattttctcctatagttaatgtatccaataaattaaaatcctgaaatacaaaacctaactctcttcttctaaataatgcaagttcctcacctcttaacaataaaggattctttccctttaattccatagttcctgtagttggcttgtcaatagtagaaatcatatttaaaagagtagtttttccactaccagatggacccataattcctacaaattctccatcttctatactaaaatttatgtcatttaatgcgttgaaaattatttttttaccatatactttacttaaattatttacagttaaaattttcattatttaactatccttcctaatttaatttttgaaataacatatatataattgttaattataatttatcttagtttaatttttatagataataaatctattttttctatacactaattatgttagtaaaagctaatactgcaagtactacacccatgattattctgtatacagcaaacactctcattggttttttctttaaaaaattcacgaatttttccataactattattgatacaataaaagctactataaacccaactaccaaagcaatccacaatgttggtgtcattattgaataatcaaattcaaataaatcttttcctgaagaagccaccatagctggtactgctaaaaagaaagaaaactcagctgctgtaggagaattaagtcctgctatccatccacccataatagtagatgcactccttgacatacctggccatgcagacaaaacttgtaatgtcccaacctttaaagcttgtattggagtaattttatctatattatctgttgaatgattcttttttctaaacaaagtttctactactaataataaaatcccacccactataaatcctataattacagattgtaaattaaacaatgattttatattatcataaaatagaactcctataatcgcaaatggtatacaacctataattacattcattccaaatctaaaaccaatctttccttcttttccgccagtaaatataaatttaaaaaattctataacgctatcttttatctttttccaataaagtactactactgctaatatagccccaagttgtattacaacctcaaacatttcagcaaattgccccttaaaatctattaaattaccaaccaaaatcatatgacctgtagatgaaactggaataaattctgtaaacccctctactatagctattatgactgatttcaatataaaaataacatctaaactcatcaataaacatccttccttttttacaaaatttctttttttatgttatttctctcatgttatttcttatattaattgtaatttagattagaaaatttaactatctgcaaacattacacaaaccttacatctatgtaaggtttgcaaataaactctcttaaattttgattatttaactatgaatatttcatttaataaattgtataataaaaaagtacaattaactaaaaaccctattgtaacagataatttacatctttatcaaactatttacatctttattaaagtagattgaaacttctgtaccttttcctacttctgattttatacttactttatgacctaaatcatcacataccttttttactagataaagacccatacctgtagattctccaaacttacgaccattttctcctgtaaaaaatgggtcaaataccctttttaaatctttagaaacaattccaattccttcatctattatacttaaaattacatatttattattttcttcagattttatagttaggtagttactataatctttagaatatttcactccatttgtaattaattgacctattataaatttcatccattttacatctgtataaacataagtaaatttgtctacttgaatcttaggaatcattccactttttataaataaccttttttcttcatttacaatactagatacaatttcatttaatttggctttttcaactataaagtctttctgaaaattatctgcccttgcaaaatgcatagccatatctaaccctttatttaatctatctatttcttttcttatattttcagttacttcttctccctcataatcttgaagctgaaggcttataactgatattggtgttttcatctgatgaatccattggttgatgaaagttaaatgttcactatgtatctttttatgctcttgtatcattgattgatacaatttatgttgttgttttaaaataactgatatatttctccccaagaatgagcttcctaaatacaaaaatgactcctccaaagaatgtattcctttttcaaacagattatatacttctctatttttataatacttatatattaaaaaacataacaatataaaagaactaaataaaagaatatataaactctctccaaaactaataaacttcataagattacagtaaataattgtcataactatgcctatataatatataaaaatataacctttataatcttttaaaaataacttcatactttctccttaccaattcttatttaatttatatcctaaccctcggacagtctgaacagcattatctatacctaattcctcaaatcttttccttatcctgctaacatttacatttaaagtattttcttctacaaactcaatatcatcccatatcttttctaaaagataatctctacttactacttttgggtatctcttgataagacattcaatcagtataccttcttttttagttataattagattttcaccatttaattctagttctaacctttctggataaaactttaatccatctagctccactattctttcgtctattttaggtgaatattcaccatatacccttcttatatgactctttatttttgccattactacatcatagtaaaaaggttttgttatataatcatctgctccactttctaaagctctaatttggtctacattgccatctctagctgatataaaaattataggtaaattcgactgttgtctaatacatctacaccagtagaaaccatcaaatttaggtaaatttacatctaatagaactaagtgtggcttaaaactttcaaatgtaatcattatatcatcaaagttctcttcaacaatcacttcaaatccatatttctcaatataatctttaagtaatgtacttattgatatatcatcttccacaatatatactttataactcatataattcctcctaatatacctatttactcatcatataacagtccaattttaatatattataatctttttacaatatataaatttaatcatattattaacttcacaattactgacttcataagtataaccatattattagacatcttaataaaactctataaaaaagtatctttttatgattaattaatcattattatcaactaatcattctaaaataaattgaaattactaattcaaaatagaaaaagttaccttaataaggtaacttaaacttttattatatttcttacttagtattattttagcatagtttctacttagcattatagattaattcttttatattcacttttttctcttgtaacttattttttattaagaagtcttgtgtatcttcaagcgaagatatatctttatctgttatatctaaactaaaatcataccaagcatataattctttagtttcttcaagacttaaatcaacttctttagctactttttccatagcttcatcaaaattattatttacatattctaaagtttccttttcaaccttcataaatctttcaactatttctgggtgtttctctgcaaagtctgtgctaacagcagttactattataccatctactaaaccttcaccatttgctacaagtttactacctgacttcatagctttaagagctgctggaccagcaatcaatgcaacatctacgctaccatcagaaagagctgctgatgcttctggaatacccatattaacaaattccacatcatccatacttaatccttctttatcaagtgctgaaatcaatacctgatgtaatatagtcccttttggacctgccaccttcttacctactaaatctgctgctgattttattgaattattattagtcaaaatcataaatccttttggtgacctgctataagtgtttaatatctttaactctactccattagatgcagctattaaagctgacgtaccacctagtgcatgtaagaagtctatttctccagcagctaaagcctgtgtttgctctggacctgtagtaatttcgtgaaagttaacttttatattatcctttttaaattcctttccaaataaatcatcctgtttctgaattatagaaggaacatttaatggtgattttacataagttaaatttatttctgaaagtttttctccattattttttttagcacatccagctaaagatgctgttgcaagtgttaatatcgttatacctatcaatagcttttttaatttcatttactctactccttaaaatattattaatttctttaaatgtctttatttgatttcattgtcattaaaatatctttttttaatttaatatagtactctgaagttaaatctctattataaccatcttctatattaaattcttttatttttctttcgtctgtgaaaacaactatttttttgcctatctttaacgcttcatcaatatcatgagttacaaatattacgcctttattagttgacttatgtatttttataacttcattttgcatatcaatccttgtaaaataatctaatgccgaaaaaggctcgtccataagcaacatatctggattgaaagaaagagctctagctatgcttactctctgtgccatacctcctgacaattcatttggataagagtttttaaatttctgcaagttcatcatcttaagatatttttctacatcaatattacttttcctattatatttatttgatttgttcaaattatcatttgtttctaagcttctaaaattatcatttataattttaccaataattcttttattgtgtttaaattttctaagcaccttgtttaaaatagtattttttctttgattatgaaaagctatattttcacttacgtttaaccaaggcattaatctgctctcctgaaaaacaaaaccaacattaggtctatactctttattatcattaataaacctaatctcaccactatttataccttcaagtgatgcaattgctctaagcaaggtagtctttccacaaccactttcacctaaaattactgttatatggtttctatctatgtttaaagagatatcactaagaactacatgttcttcattgtcaactttataacttttatataaatttctaattatatatccagagtcacatactaaattattcatatgcttccaccatctttcccttacttaccttcttcacaataatcgaaaatatgtaatctgtaattattcctaaaagtccaattacgattatacctacaataacaacatctgttctagacatttcttttccatcagatatcaagtatccaagaccagatgaagctgctacaagttctgccccaataattgctctaaagctatatccaagagctaactttaacccaacagcaatatcaagaatggcatttggtattattattttaaatattatctgaagctttgaaaactcaaatactctacccacttcaatcagttttgagtcacaatttttaatccctttcaatgtgcttgtaaagattgggaaaaaggatgctaaaactataattataatttttgattcctctcctataccaaaccataatataagcattggtattaaagcaaggggaggtgtattccttaaaaaatttattagagatttaaagtattcgtatactccactataaattccaaagaatatccctaaaggcacacctatagcagtatttattgcaaaacctatcaaaactcttttcatacttgcatatacattaataaatattgaaccatcacttatcatatttaaaaatgtactatataccttttcgggtgatggtaatatataatcactccaaataccaagataatttgtaattttccataataaaagaattataaaaaatatcagaacactctttactagccttaaaaacttattattaaatttattgaccatttacaaaccatctccattattacaaccatctttacaataaaacatttctactatgtcatacttatcttcaaagccatttcttattttttgtatttcacttaatatttcgtcttcacttgatacttcaagaactttttcaaaagtatctttgaaatatcctaatggaattggtgattcatctatttttccaagtgattttacaccttcttgttcagcaaactctttccatgtataaaacatagcattacccttatccttaaacttttcacttgcaaagtctcttaattgtgtacatggacaggttactaccaacatatcatctttactttttatatatttatcgtataaaaccctacaagtccttactaatattggttctatcataggtacttcaaaattatttatcaaattatttctttttaaaagacttatactttctggacatctacaatccaacattgtattttcagtcttttttgtatactctttgtactgcttttttacatattctaactgtggttcacattctgctattatgtaccccttttttatcaaatttgctttaataaggtgaaacttttctccatacattctttctgccactggatttattagaagatatttattcataacgcctcctattatttaatattgaatattattatcaattaatagtttaaatgagcacttaaattttgtcaatatattaatttttccttaataaaacaatttttatctacattttttaatattttaaatgaaatattaaatagtatatgtaatttattttaattaataatgcatacatcttactaataatctatttatataataatctataaatattatataataatacttatataattagtattattatttaatagcaacagttattcacactaataaaagtagaaagtttttaaaatattatgaaacatcaaatttaattttaaaattgcatcaaaaaatgaagtctcaacagacttcactttttataactcttataaattattcaaaatatttatacttccctttctacttcaaaacgtaaaaccgtcttcaatgattcaggcgatacttttctagcatcacttatataaatttcacgatgtgtgtaagattttcttataagtttattttttttgcaaaattcgttcataatgtcaaaactttctggttcattatcatatgaacctatatgaagcatttgaacacatagcccttcattaatagacccaaacctaactttttcaagaagattatgaggtttcttcttctttactatatcagtagctttatccaacaggtcttgtgtaacaaaatctggctgacgtatcattatagtgtaaattaaatcttctttaataagtacatctaagcctttacttttttctcccttatcccatataccttctaaaggaaaaaccgtatagtcaaaatacccttctggtacaattccttttttaggcatggtttttattgcatatgccaaagaataaagtactcctattgcttcaataaattctttagaatttgggtctccactcccttttaacatgataaatttctgttctggtatttcaattattacaggattctttttaggtaaatataactctttatctctttttctccattcatatttcataaaaatacctccatatatattttatacattgatattatcacgctaaaagtgacaacagtgtgtcataattataaattatattataaaatcttcatcctctaattcctcatacactcctttttggtatccattacccttagttgaaaagaaatcatgtgttttggtttcagtgctaagaccatttaatacaattggatttatagcatctacagtatatagcttctcaaaccctagattttctaaagctctattcgcattgtattttaaaaagttcacaacctctttttcaagcccactttctctgtatataacatttgtatactctatctcattctccataaggctataaagtatagaatacatcttctcttctaacatcttcttatccattttatcaaatgaatcgtatatttcttgtgctagcaatcctatatacttaccatgtaaagactcatctctaagaataagcgatattatttctccactagctaccatctttccttgaccagatagatacaatggataaaagaatcctgaataaaacaagaaactctctaaaaatacacttgtaaccattgataggtataatccctcttgatttgtagtattttcgtattgagctaaaactaaatcagcctttctttgtaatgttggttctgtttctatccattcaaataattcatctatttctaaattagaaagtagagtcataaatatagaagaataactttttgcatgtatttcttccatagtccccataaaagacaagacagcttttctttgtaggttttctgttaaactcatcatagatggtattccattattcccctgttttgtatccagtaatgttaaaccacccaatacttttttatataattccttttctttattacttagttcattccatacctttatgtctttagaaacagatatttcttcaggaagccaaaattgttttacattttgttcccaaaaagcttgtgtaaatccatcttcttctctattccagttaactgcattatgtattttatgtaaattaaatgtcatatatttctctccctatactgaacacactagacactcatgagtatctcttgtcatctttgttcttgtgtaatataaacttttcaaaccttttttataggcatatatgtaatgtctagctatatctctagttgtcttttcatctgtaacaaacagtgttgttgatataccttggtcaacatggttttgaactgttgccactaaatctatgacctttctcatatccatcctgtatgctgattgataatacaacatattatcatttgttaaaaatggcattggatatattgtagtagagtctccatatgttcttacttctactggctcagtaattggcattatacttgatgtagcattttgaacataactaatgctttgagttggtgctactgccattaaatatgcattatatatccctttttcttttacttcatccaataattttgtccaatcttcttttgttggtatataaatcccttcaaataatgctcttaccttttctgacttaggtagataagattgttcatagtattttgataaaaccttgctatttcttcccttaacatattctgatttatcaaatccttcaaaagtttgatttctttctatggctattttcatagaagctttaattgaatagtatctaaccattgcaaaaaatacattagaaaaatctatagcatcatctgaagtatataaaatattttctcttactaagtatccatgtaaattcatagctcctaatcctatagaatgagacttgctgttactattgcttaccgttggcactggttttatatctgtgctatctgctacaaatgacagtgctcttattgctgtttcaactgtactttctatagttttattatccattacattggctatgtttaaagaacctaggttacaacttatatcttgtccccattcattttttcctccatacccctctatttctgaaggtgtttgatattgaaatatctcacaacataagttagacattttaataattccaacatcttttaatgtatgttctctattagctgtatctatgtacactacatatggatatccactttcttgttgcatttgtgctatttttgtcaacatctgcctaggatttatttctttttttcttatatcactatcattaaccaatttatcataccactcatccatttctatctcatcaagagaaactccatatttcttatacacagtatgaggataaaatgcatatgctacttcatttttttctgccaactccataaatttatctggtattatagctcctaatgataatgtagcaagtcttattttttcatctgcatttatctttttagtatccatcaacaattcaaaatcaggatggaatacagtaaggtacaccgcaccagaaccttgtctagctcccatttgattaaagtaactaaatgattgttctaacattttagctactccaacaacacctccagctgcaccttctatatctttgatagattcgccagatgctctaagtttagataaatttagtgcaactcctccaccaatctttgataagtgatttgatgaagatatagcatatgatataccttctgtactatcttctacagatagtaaaaaacatgataccatttctccagccctctttcttccagcatttaaaaaagtaggtgtagctggttgaaattcttgttttactattttatctgccaagtttaaagctaaatctttatcgccatttcctagtgtcaaagctacaattaacactttatcattatatgtttctaatatttcctttccatcattgctctttaatgcataattttgataaaacttatttgcactcatatatgattgaaattcaaacttatgtttatcaatcatatcatatatatttttaataacatctatgctatactgatttattacttcttttaaataataaccttcatctattaaatacttcaatctttcttctaggttattaaattttctcaactttggttgtataaattcttctatgtaactacttaaggcttccttatccttttccaattggtacttaccttgttcatttttaattatcacttgattgttaagctctatccaattcattatttaccgtccttttaacataatcttgtgccataatttcacttaatttgcttattatttcttttggtacttatcagttgaaatcccaaaattaatctataattatagaaatgcaataagtatttttcaaaaacaaaagcactacatatagtcagtgctttatctattatatactacatatagtatatacacaaatttttttatatctaaacttttattactttataattgacattatttttatttaaagaaatttttatcaactcaaatataaaaaaatacaagcttattatgtcctgtttaaaaatttaaattatctctaaatagcttaaaaatatattctgatatattgaaaaaagtactttcaagatgatattttatatattatttagaagttttttatttattgttatataattaaatatatgactattttgctactacatatataaaaataaatttatgaaggtgattttaatgaaaactatttctaaacaagaattagaaaaaacacttgagaaacattatttatggcttaaaaacaataatgctggagaaaaggcagatttaaaagaattaagattagaaaatatggacttaagaggatactgcttaagtaatattgacttttcgtggtctgaccttatcaatttaaatttagaaaaagcagatttagaaaactctatttttaataattcttatctttcggattgttcattaaaaaattctatattaaaaaatgcagacttaagtggtgcaaattttagattttgtgacttatctaactcagatattagaggagctaatttagaaaattccaatttagaacatgctactttaaatggagtaatatcagatgaaagtacccctttttttaaattgtattgtcctgaaacaggagcatttataggctataaaaaatgttttaatttcagaatggtacaattattaatacccagcgacgcaaaaagagtgtctgctacatcaaatgcttgtagatgtgataaggcaaaagtactgtcaattactagtatagatggtaaagaatcttttaaaagtgctcgtgcatatgctgatgaaaattttatatatagagtaggagaaacgattgtagctgaagattttaatgaaaatagatggaaagaatcgactacagggattcacttttttttaactagagaggaagctattggttatctataaaatgctaaagttttataaatatataaacaaaataacaaaagagtatagattgtaatttcaaaaaaattataatctatactcttttttctatagcacataagtacattttatttcataaattataataaattatttatatctgcactattgattatttgagaaactttatctatatgttctatcttactatccaaactgtcataatacttcttactctcatctctatttctaaaagaataaacttttttatccagttttaaagcctcttttataatatctatattcctcttatttgtctctcctacactaaatcctgtatctattataatcttggaatcatttaaatttctaatagccaaatcgaaactctcatcacttatcggctcaaatggattttctgtaaacatctttatccccatagttctaccaatttcataatcaatatcattttcatgtattattccagaatacagacctataccttttttagtaaaagctctataaattggtgttgctttacccccaccaccaattataaaaacttcatttttagatttattactaatttctactgaacctaaaagactattaaagtttttatcatccaattcataaagcgaatttataatatcctcatctactacatcttcaggctgaccataagctatgactttattattttttataagagcaactttatcacaactttttaatgctatgtctatttcatgcaatgaaagtattactgatattgacttttctttacttaattttttcagtatgtttatgagctccaatctatgttttatatccaagtgagttgtaggctcatctaatataattatttctggttcttgaacaagagctcttgcaaccaacaccttttgtttttctccatcacttagttcatcaaaatatcttttctttaaatgtaaggcatctacagactccaatgcttcatctaccattattaaatctttcttagatagactcccaaaaaatcctgtatatggataccttcctatattgactatatcttgtacagtcattaaatcacctaataatctatttgtaagtactaaagccattttttttgataatgcttttcttgatatacaatttatgtttacaccattcaaatatatttcaccttttattggtgatataagtttagataaggaccttaatagggtagtttttccagctccattacttcccaaaagacatagtatttctccattttttacttctacatttatattacttataactaccttgttattgtatcctacacttaaattattagttttcaacatgtctaagccctatccttccttttcaccaataacattactacaattggagctcctaataaagatgttatcgtgcttattggtaattctactggtgataaaattactcttgatattaaatcacaaagagctgtaactatactgcctaaaaatattactactggtatcaaaactctattatctgatgttttaaatctgaacctcccatgactaaagtcacagggttcctgcttcatagaattttgcatactaaaatatgtcttactaattctccacaggccatccccatagttcctacggttcttacataagttatttattttgaattgttattagtcttaatccttcttttaatatatttatacttgcatttatatctctattgtgagtttcattacaactaggacaaatccattctcttatatttaagtccttcacttcctcgtttttatacccacatttattgcatatttgtgaacttgcaaagaatttacctacctttacaatttttctaccataccaattagccttgtattctaattgacgaacaaattctgaccatgatacatcagaaattaagcgagatagtctacgatttttaatcatattctttacttgtaaatcttctatgcaaataatatcgttctcttttattaatttagtagatagtttttgcagaaaatcatttctttgattagctatatgttcttgaagtcttgcaacttttaatcttgctttatttctatttaaactaccgattgtctttctcgataattctctttgtaatttagcaagtttgtttaatgacttcttaagatacttaggattttctataaattctccacaacttgagatacaaaattctttaattcctaaatctaaacctatatgattattagtattttcaaatgcttcaatatctacatcagtacagcataatgatacataatatctaccacttggttctttagatatagtagcattaagtattctccctttaggtacttgtttatcccttatcttaaccataccaagtttaggtagttttatatgttgaccacaatacataatgtttccatttgtaaagttagttttatatgaaaatctattaattttctttgatttaaatttaggaaatcctactttttctttaaagaattttttatatgcattatctaaatcttttaaggcgttttgtagtgaaaatttgtcaggttccttaagccattttaattctttttttaaattgttcaaatcagaactacactgtttataagtaaaagtttctttattgtttttataaacatctattcttttagcaagatacttattatatacaaatctacaacatccaaaagttttgttaattaactcttgttgctttttatttggatacattctaaacttataagctttttccactactaccacctcactttacttgttttttctgattattaatatattttcttatctgctcctctgtattttctgatacagtagcaacgaaataactaggattccaaagatgtctccccataatgctggctgtctatatttgacatactatatgcatatcctctaccatgagtaacttccatttttcatcacctatcataatattaaaatatgcaattacttaaaacaagtattttgaaggttttttatatttaattttaaataacatatataagaaccataagtcttaacttttatcatttttgaggttgtcgttcacataagttcgctactacctatgcagttctcttatgaacttcttacactttcatgcaagcacagactatatcttatccttcggcattatccgttaaggtctacccacttccactaccaatagcttgtagtgtacttccctcaagaggaatagtcgttgaagtttctcctattcggagcttacctgctgattgcccattttaaagtacttagggtttaaccttataccatctaaccaattttttctactttcgtaactttcacacttaggtttatttcatccttatgttttagtttggttagctttaggggtttccagcaattcaagtagtattggataggttctatcctatctctacatataggtttccctatatgctgactattttagctactaactcatgactaaagtcacaagtgtgcgtagctattttttaatcaattttgaaatttgtggcactgcaagtccaataaaccctataggtcctgcaaatgctgatactattgctgctaatatactagatataaacactatcaaaactctaaaaaatcttatatttatgccaatactttttgcatactcttctcctaataaaaaagcatttaaaggttttattatgaatacagtcatcaaaagacctaatataccaactattataagtatttctaccttttcccatgtaaatccagaaaaacttcccatagaccacatagtaaattcttttaatttatcactatttgcaaatgattgtaacacatttgttataccactacatacatatccggtcataattcctattattaaaagagttgttatattctttaccttatttgcaaataaaatgactatagacattacaattaaagctcctataaaagctgctacaaatatactcattgaatttacactctcaaatcccaatgtgtatcctcccaaaatcatgagagctactgataaagtagaacctgaagatactcctaatatatacggttcaactattgggtttttaaaaaatatctgtaataaaatacctgatactgctaggcatgctccacctaccatggttgcaagtactctagggattcttatattgtatattattttataatgttctgtattatccatacctcttaatacaacatctattacttctttaaattcaatttttacagagccaaatgctacacacactaaaaaagtaagtatcatacttataattaatactataaatattgtcgtattccttattctcattttattgataaaatccatttgtatactcctcttagcaaagttatattaactaaaatctataaaacctatctttttgtgtcctctctgtactatttatcataatttatataatgtttgattttttcacctgtagtacctgggtggaacatctcaactaaatctactattaattcgtccgtcttatctactgattgataataatctggagcaaacacccataggtttccgttttttacaacatccaaatcagccaatacaggtgcactagattttatagaatctaaatttggtgcataatctgaacttgatgagtatacaaatatatctgcatcttttgcaacttcatgcaattgttcaatacttactcgcccttcatttgaatctattgaagcacatgcatttattccaccagccatttttatcatattatccacatatgaatctttaggagctatataagcacttccttcatatacagatgcccatacaactttaggtttagctttgttttttatttttttacttacttcttctaccttttgtacagttttatttagttcactagtagccatatcttctttatcataaaatgcagctattaaacttgtccactccattcttccaaatggattttgctctttatactcattgtctacaacataattaagccctaattcttttaatttgtcaataaattttgtatcagcctctgataaaccactactcactatagttaagtcaggatttaagtctactattttttcataatctggtgctaaatttgaaccaacgtaatgtatttttccatctttcattaaatctttaatttctttaatagtccagtactgctcttctgttgttacggcttttatactatctagttcatctattgttctcagagaacaagcctgtgttgtagatgctattaatacattgtccacaggcgttctaactatattagcatttttatatttttcaggaattttaatcttctttgggattaaaatcagttctcgattatctccatcagttacttttttaattccatcttctaaatcttcaacactaaatccactagcatattttaattctaatttcttaccagtactagcttgtttattctctttgtcacttttactacaccctataagacctcctaccataaaaattaccatagcaattaaaaaaaactgctttaaaacatttgatttaaatttcatctctttcactccaatatcttattttttatgagtggctaaaaaactttaataatatatgctttttaaagtatacttattaaagttatcctaaagtcatctttaataagtataaccttttaataaaataaaaaacttctcctaatttaataaggagaagttcatatatcaactttacaaaaacgaattgatacttcattttattataaattacaatctccaccctaaattgaacttatataatactgggcaggtctcctgactcacggcttttcctccatcacccttcccaaaatttttataaatttcagtggattttgatttcgtatccgtatacagtagcgggggctgtagtgaattttcatcactttccctattaaactaatatagtaccctagtattattttaatttaatttttattaagataattgtaatttattgttgacctctttgcaaggttgatttaacatatatttaatttattcatcaattttttaatttcacatacttgtttttcatttggttttacaaatggagcagtcatataatcacttatttgtaaccctctgatattcatagcttttttcattgctggtataaatggattggttattaagtaaaaatccattgctttattaatatatttttgaatttctataaccttctccatatctctattattgtaagcttcagcccatttggagcaaacttctggaattaaatttgataatccccctatacaacctgctcccccagacattagattatgtataaagttttcatcataaccactataaaccttaaattctgggaactctattttcatagtatttattaaatctctggtatgtcccatcaaagttactgtatccttatatccaactatgtttttatgttttcttgcaagtcttaatgtaagttctggacttaaatcataaccagttctatctggataattgtataaatatatttcagcctctgtattcttagctatttcactataaaataactcaatactatcatcatcaagagagaaataataagggcttattatcataacgccatctgctccactattatgtgcatagtttgaaagttctatagattcatttatacacatacgacttgtacctataaacacttttactctcttatttacatgactagttactaaatctataagttctttttgcatatccatagacatattaaagaactctccagtacttcccattatgactagtccatctacacctccatctataagatggtcgtacacttttttattaccttctttatctaaatttccttcttcatcaaatattgtaacaactggtgtcaaaaattctgctttcataatttaaactcctaaaatttattttaatatgttcattaatacatcagatttagctttaatattaattatattaaaacatttacttaatgtaattttttaaaattccaatactctcaatctcacattcaactacatctccactactcatatatcgaggaggtgaaaatcccatccctactccagaaggtgttccagtagctataatgtctccagcctctaaagtcataccttttgaaagttctgaaactatgtctgaaacatctgatatgaataatcctgtattagaactttgtctttcttcaccatttaccctactacatactttaagttttatgggaaaaggaactgcacttttatgtaaaatacatggacctaaagaggtaaatgtatctaatccttttcctctaaaccattgaacatgttctttttgcaactttctagcagaaatatcatttataacagtgtaaccaaagatataatcttctacctcttcttttctaatattaacacctgttttacctattactactccaagttcaacttcatagtctagttgattatttatctcaaaatgaccatctatctcatcttctggacctattgcctttgtcacacgttttgtaaaataaaccgttttttgtggctcttcaaaactatcatcaaagtgagtttgagtttcttcaagatggtctttatagttcactcccacacataagatatcatgtattggtttttctataggaacatgtacagtacatctctctcttttaaaaacatcataattatagaatatactttcatttataatagttttcaacttaataatatcttcactagatacattttgaattaattcatttaaatccttaaaatttctactgagatttaaagagttaacatctataataaataattcatctttagaaaaaactccagttcttttacattcattttctccttcagtaaaacttacaaacttcataatctcaccctttattaaaattctatgtatttattttcttacttaaagattatacatagttgcatactctagctattgccatttcagtatatccaagggactctgcttttgattgttttccatttgctacatctacaaccatatttaacaaatcatctgttaattcttccattgtttgtggaccatagataactggactagcatcaaaatccatattatcttccatatttgcaaaagttattttatttccagttatttttattactggtgctattggatttcctgatggtgttcctcttcctgtactaaataccactatttgtgctcctcctgctaccataccagcaacagatgaagcatcatttccaggggtatccattataacaagacctttcttatcaatttgtttggcataatcatatacttcacttatttgtctatgacctcctttatgtatacaaccaagtgatttttcttctaaacttgttaaaccaccagctatatttccaggagatggattaccttctctaacttcttctccaaccaattttaatgaattttcatatctatgtactatatgtaatattttttcttttacttcttcatttactgctctcctagctagtatatgctctgcacctataaattcagtagtttcacttaaaattgatgttgctcctaaatcgacaagtttatcacttaattcacctattaatggatttgctgctaatccacttgttgggtcagacccaccacattcagttcctagtataagttcagatattggaaattcttcttttctaagcaaagaagcttcttgtgccatttctctagcataacgaacagctttttctatagtttttaaagttccatgttcttcttgtattacaagagtttttattggcttatttgttctctcttttattgcatcaactaccaaatcattttggcaattttcgcatcccaaagatacaactattacaccatatacatttggatttgctgcataaccagccataacatccatagttaattgttggtctgaatgtacttgtgaacatccattctgattattaaaggtaactgccccttgaacttgtgatgctattattctagttgtatctgatgcacacacactcgtaggcaatattaatatgtggtttcttataccaactcttccatctggtcttttatatccataaaatttcatactgatttcctcctaaaatagtctatatactttttataatttttatatattataatttttattacactcactaatcaaacagctaaaatcctatttaaaaactatttgacactaaaagcaatgaatacaacttttataactctataaatattattttatatattagtcataacttgtttatccaaatcctctctaacacttctaacattatgaatatgtacatgttgaccactttttatttcctgatttgcttctcctatatgttcaccatatttagtaactttatcaccttgggccatatcttttatagccaatttatgataaatagttatattatctagtgctgtaatcgtttttactgttttgtcttttaatttaaaactaatttcattacctttagctattgcttcaatagctactgcaacattatctttttcatcaattatcactgcatttatcattattcttgctctcctttataaataatataattttattaatatcctaaaatctaattaaagaatttattattttaccaacaactcactgtaatataaattaagctgttattgtaccatcctcattttgttttgggaacttaggacatccatacttcttagcccaccaactagttataagaggtactaatattgcagtgacaactactgcggctgccacttgtgttgtagctgttgcaacatatggttgccatgatgggtcaactaatgcaacagcagcaggtacagcaattgcatttccagcggttgtagctacagcccatcctgcatatcctggacgttttcctataaatttatcacagaatactataaatatacctcctacaaatacagatattaatccaagtaatactcctgataaacctccttttagtatacttgcaagatttatgctactaccaagtgcaaaccctacaaaaggtacgagtaaattacaccctggctctaaaaactctttcatttttttgtcaaaatttcctattatcataccaacaagtattggcactattgcagctaataatgacaacaatggcacatttgcaagacctgaagtcccaagagctattaatgtaaaaaatggtccatcatttaaagtaagtaaactcatagttgcacaatctgtttcatctccatatgaagtcatcaatgaaagatatatactaccattactatttgtaactgcacttataacagccaatgttgtaagaccaaggacaccatccattccaaatagctttcctataagtatacctatcaaagcacctatagcaaatttagaaccaagaagtataccacctctctttaaaacttttggcatttctctaaattgaagctgagttcccaagcataccagttgaaccccaattatagttgcagacccaacacttgaaaatactgctgtcgtaaacgaacctatttgtacaatatctgggcaaaaggtattaatgaaagctgctataaacattggcactatcatcatacctgcaggaatttttttaataaaatccattatcataaagttaatcctcctaaaacatgatatttaattactcttattaagtttttagctttaattctaacggccgtttcggttcgtatttaagaactaagtttttaattacgaatctttgaattaatgatagcattttcctatttatgagtcaataaaaaaaataaatttttgtcaaatttttttcaaactttctgataataccttgtatattatcaaatgacttccttatatgcaaaaatacagcgtatttaaaattatatagtattcaaaactataaagtttttatacagtgtaaaaaatagataaaatataaattcataatattttgatatttacatataaaaataactattgcatatatttacttaaattatataactaaatatcacttactttctttaggtatattttggaaattagttattccttaatgtacagtctaaaaaaatatctatctgtatctaaatcaagagcttatttatatataaatttacatatttattttctacattgtaaaatatcgtatagtgtgctaaaatcaacatattctaatactttaaattaataaaaagagggggaaatttatgacttcagataatcatcgcccaacagctaggatattagatattttagaagcattagcagaatccgaaaatggatatactcttacagaaatagcagatgttatcaatgctccaaaaagtagcatctttcctatagttcatacacttaatgctagaaaatacattactattgataaaaacacatccaaatattctatagggatacgttcttacacattagggtcttcattttttgaaaaaagaactatttttaactatataattgacgaaatgactaatatagttaattcctgttctgaaacttgtcagcttggtatacttgacaataatgaagttctttatattggaaaagtagattctccagaaccaattagacttatttcttatgttggaaaaaaaatacctgctaattgtacaggtcttggaaaagctcttttatgtgattttgacaaggaaaaactaataagcttatatccagatggtctaaaaggttttacagaaaaatcaattacagattttgatgttttatacgaccagcttcttgaagttcaaagaacacaaatagcttcagagtgtgaagaatcaatggaacacctaaaatgtcttgccgtaccaataagaaaaaatggatgtataagagctgctgttagtgtaacactgcctttatttagagctaatgacgaaaaaatagaactgataaaaaaattactcttaaatgctcagaaaaatattcaatcaatgatggaagaacgtaatgaagacattgtaataaattagattaatattctgtatatggaagatatcaaaacataataattaaaaattttgttttaaactaatgtatttatttgatttatactataaaaacaaagttgctgatttaactacagtaactttgttttttttataatattttttatatttttattgacatgataaaaatactatgttaaattctaatcataatcgtaattacgaattaagttcttatataagaaccagtaaccctatctcaatctaagatacgatatattatgagtaaattagtgaaaattgttagatatatatttttacataaaaatcaatgaaaataaaaggagattttagttatgagcacttattatgtaccaccaataaatttacttgggaaaggatgtcttaatgaagctaaagattcaattaaatcattaggaactaaaaaagcatttgttgttagtgataaatttctagtttcaaatggtactgtaaaaaaagtaacagatattttatctcagatagatgtagactttgttgtttatgatgaagttaaacaaaatccaaccgtaactaatgtggataaaggacttaaaatattaaaatcagaaaattgtgacttcgttataactataggaggaggttctccacaagactgtggtaaagctatctctatattagctactaatggaggagatattagagactatgaaggtatcaacaaaacttctaaaaaatgtcttcctatcgtagctataactactactgctggtacatctgctgaagttacaataaactatgttataactgatgaagacagacatgtaaagatgataatggttgataccaactcactagctacaatgacagtaaatgacccagaattaatgattagcaaaccatctaatttaacagcagcaactggtatggatgcactaactcatgctgtagaagctgtagtagctaatggtgcttatgatgttacagattcaactgccttatatgctataaagcagatatttaaataccttccaagagctgttaaaaatggtaatgacatagaagctagagaacaaatgtgttatgcttgttttttaaatggaattgcctttagtaatgcaggtcttggaaatgtacatgctatggctcatcaattaggaggtttatatgatttacctcatggagtatgtaatgccatgctacttccaatagttgaggaggaaaatgctaaatcagcccctgccaaattccgaccaatagctgaagttattggaatggatgtaaataataaatcagataaagagtgtgttgactttgtaatagataagataaaagctctttctgaagaggttggaatcccaaaatctttaaaagatgtaggtgttgataatcctaattttgaattgcttgcagaaaactctatgaaagatgcttgtgctggtgctaatcctgttttctttgataaggagaagattatagaattgtttatgaaaatatcttaattatgtatatttataagagagtgcctcaaaatatctttgttttgttaatagcactctcttattacactttttaaatagtactctttatgaagaagttaatatataatcctattaatttgagaatcattatcccaataaaaactcaaaatttttcttaatgaattataactgttgttgtatctggtatattatcatatatccactttgcattttccgtacttaatcttatacatccatgactaagagcttcaccaagtctgccatctattatataacttcctgttgaatcatatagcacagaatgatagtaatatccacctttaattctagtagcatacttaactgaatactcatccgttccaaaagaaggttttcttccacttatataaaatatacctgttatagttggagtctcaggcttgcctatagtacattgccacttgtaaagttgcccccagcctccattatctttcttaaaaatataagtatatttatttctaaggtctgttacaattagataatcgctagtacttttaatattattttcgttaacaaatttaatcatgtcagtataaaaatacttataatctaattcatttggtttattcccatcagttgataaaaaataattaaaaacatatcctattttatcatcatatacaatcttactccaatctccatctacttgaaggacttcaaccctagatttttcaggaattactgtaattatattggaagttatagatttatcttctcttaagtttaagttactccaagcatattcgcttactgataccaaatccttatacacatatccttcttgagaattgtacatcaccttaatccagtcatcttcttcatccaatacttccattttagctccctgaggtattactgttatgatacttgaattagtagatttagcagacctcaaatttacatttgctaaagcatatttatatataggtgctctatattttttaatatttagtttagttaatttcacacatatccatcctctcatatgtctttttacaacattttatgaaattcgatatgtattcgttctcctattttcaaactttacttgtattactaataatattgctacatatacttatatattctcacctctatttatctatttatttaaatttatgatattacattctttaatatactcttcaattatacctctagccacattaaaataacttatacacttgtcaactatgactgcatcactactaactactctatctaatttttccaatacaacatctgcattttttactaattctacttcagtttcaattccccaagttttggcatgctctaatatcctatactttaaatttcctgaattagaaactggagcatctaaataaaatttaagattctgtgcattgtatttattaaaaaatttacctatcagattcaaagcttcttctgttttatctataatcttataggttcccctaagacctgctaaatctcttatatttccatcacttcctattactagagtaccaccagataatgctacctctatggatattatcaaattaaagccatctatatttacggtatcttctttgattttatctagaaaaagcctttttgattgtcttataatatttttttcatcagtacagactgctctttttaatgcatctctttgtcttatagaaaactgatatctatcaccaacaaaagtaacgactgggtctattttgtaatccctatttaataaccattctatttcttctttagcctttataagtcttgttaattctttacttgaaaaccatcttttatcactatcatcaaaccctcttttagatatcttatttatatcatttcaccaccttgctttaaagatataactgtactacattaaatacagattatttcaccttttaagataatttttaataccattatcttatccatttagattattcaatatttataattaattataacgcttaacctcacttaataatacagaataatagattctatattatatttataagtttataacataaataggtagtgttttaaaataaactttttagttcataagataatcttcttttataaaatcaaatatatttttatcatttaaaaagtaaaaaagagacttatctctattttttgagatagcctctttctaaaatctacttataatgataattttaggtttatatattaaacttatgttatacttcttttatcatattaggagatagaatatcattaagagcttctgtcatagttggatgtgcataaacacggtctcttaaatatgtatactctacttctaaatctacagctaattgaataagatggataatctcacttgaattttcacatatcatactagctccaagtatcttattggattttttatctatcactatttttataaacccatctgccttgccaatctgtttagctcttggaattgcttctactggcatctttgccactaatacttcatatcccttttctttagcttgtttaacattaagaccaactcttgaaaatgctggacttataaatatagaatttgggatattctttctatcattagttgttctagtcttatctccaaataactgattaataactatgcgataatcatccaatgatatataagtaaattgtggacctccatttatatctcctatagcccatatatgctctttattagtcttaagagtttctgagactttaataaatcctctttcatttaattctatacctgcattttctagccctagcccttcagtgtttgcttttcttcctgtagctacaagtatcatattacttgttaattctttagatttaccatctacttcatattctactattgctgattcagaaacttctttaatctcttttatatttgcattattaacaatttttacatttctctttgcaagtaattttattatttcttctgaatcctcaacatcttcatttggtaaaatgccattattagagtttaatattgtaacttctgctccaaatgaactataaataccagcaaactctaaacctataaatccagctcctataattgtcatttttttaggtaaaactcttagattcataagagactcactatcatatactatattcttattttcaattcccttaatattaggtataaatggtcttgaaccagtattaataaatatattatctgctactaactcataaatttcattttcagttttaacttgaactgttttttcatcaatgaaagttcccattcctgtgaatatagttacattctcatttgaatttaatttattatagttagcttctctgagttttgtaattaaagtttcttttttatctatagctttctcatattcagcttgtacttcatcccaagaatttatattctttgtttttacgctgtttgctgaattttctaagctttttgttggtatacatgccacatttacacatgtcccaccatacatcttgtttgacttttctattaaagctacttttaatcccctgtttgccaaatctcctgctaatgtttttccaccttttccaaatcctattattatagcatcaaatgtttttttcatataaaattcaaccctttcttgtattgtttatacttttactataacaagattatttaggtggtacaattaggcacttttttgtaaccttaaattgattcataaacatatacttaaatacttttatttatttctctgattttcaataaatgatgccatagttgccttatccatagctcctggaatatactgagttacatatccttccttgtcaattataaatgtagttggaaaagcattaattccatattgatatgctaatgctccatcttcatcaagtacaacagggaatgtataaccttggtcttttaagaagttaactacatgttcccttgaaccttctctacctaaattaggtgaagctactcctaaaattactacatcatcattgtttttattatagtctttatacagttgttctatataaggcatttcttctttacatggaggacaccatgtagcccagaaatttaagaatacaactttgccttcataatcacttaatttatgtgttttaccatactggtctgttaaagtaaaatcaatagactttattctatcttcatcattagacccgttatcattattgtcattattagagtctttttgactattattaccatcagaattttcttctttatcagtagaattttctcgcttattttcttcttgcttgctttcaattttgctattttgtgacgtattaaagtgtttgcttatacttccaaatccatttaccatcattaatattcctgatactataagtataatcccacctatttttttaataatttccatgttagattttatcttatctatagttttaaatagtttactgtaaaacatagctgtaattataaatggcaaaataaaaccaatagtatatactgctattaaaagattggcactaagatgattacttgaacttgaaaccatgactaatacagatgccaatattggaccaatacaaggtgtccatccaaaactaaacgtaaaacctaatataaaagctgttattgctttcatttctttaaacttaacattaaatcttttttctctattcaatattgaagatttaattattcccatgtaaaataatcccatgataataattataatcccaccaataaacattattaaatctttattttcattaaaaaacatactcaatacttttactgatgaacccaatataaagaatgttgttgagattccaagagcaaaaaatatagtatttttaaataaagaacttcctataaaactcgtctttccttcttttagattttctacactactatttgacaatatactcaaataaataggcaaaattggcagtatacatggtgaaaagaatgatactataccttctataaatactaaaaataaatttacattttgcaaattaaaattcctccttattttatttccaatattacaatcccatttctaaattaaaatctaactaaaaaattatgtaattttaatacatttttctactcatagcttaattaaattttcattacttacagagtaaattttagtatttatcacaatttaaatttttattgctccacataatcattttttccatgacaggaagcaatcgtaatcctgattcacttaaaaaatatgttgactctacaacattattaaccaactttttttggttgactataatcccctgttcaattaaaaaatctagttgttgaactaacattttcttactacagtctggtatagctctttgtagctctccaaatcgtttcttatcttcttgtattttccatataattatagccacccattttttacctaaaatatttgataaagcttctactggacaattatatatcatatcatctatgttgtacattttattctcctcttttctttatttaatttattaaacaaacttttatagcaatatatttattaatattataaatatacctagctttatttaattaaaatttttattatatatactcctattacaaactattttagattttatgtaattaatatatcagttttgtaaatacataacaattggtaacttttttgtaactacatcaaccctattaatatacaatctttaactcattttattaacattttattattttaaattatatataaaatcactctaatataataattctttatttaaactgcttatcctgttaaactaattattctacttcaataaattctatattaaatactaaattcatatttaaatactaaaactattcattaatatttacccaaatttatacaaattaaaaagtctggcagattaatatctgtcagactttaaacaataaacttacttttacacttataaatccaataatattgaaataacgtcaaaaggtgctatttcatatacctgttcttcttctacatcttctattgcatttacaattttcccatttctatttttaaatatttgctcatccaatatcattctattactacttggattttccactcttattataaatttatctttactgtaataagaaggataacatgctgatataagatatttttctggtaaagatattatttctaattctctacttacagttttattgacaattgatttttgaatcttattatctatacgatataaaaagaaattgtaatcctgtaattgataatttacacattcccttagataattgtgggttaaattcgcaatttccaattcatcaaatgatttagaatccatatatattgcaaatgaaaattctaatttcttaagcatttgagctttatctgttttaattcttatatgaccttttttagttgtatcaccagaagcacgtcctggtctatataataaatcaggctttcctagttcatctgtagtagcaagtaaggtcaatgcaatttcatcttcaatatgttgatactcttttattcctctagtaaatacagtacagcttctattttggtttgttagagtaatattactttccaaaggttctaaatctataggcatttcactgtaaatatcttcccagttgtctaaaactccattttctcttgttatatatccaaatggcaatgatgctatgtttttattatcttttatatcagtttttatatgaacacgtagtctatgattatatatcgtgttatcaacacaaagttttacatccatcaatggattttctttggataagacaatacttacttttacatttaatttcccattaagatatttgttttttctatcttctaatgtaagtggtagtaaagtagtacctttaaccaccaacttttcatatcctaaagttttttctgtatacactctatcaaatgaaagttttatatcctcgtcattttttaatggagaaaagtcataggtatcgcctgcattaccactatcttttaatattaaaaagtttgatatgtaagttccatctttaagttgtaaatttaagcttccatcttcatagattatcttataattatcattagatataaaagtgtcattagatttatcaagtgataccatttctttatcacttgattcaaaactaacaactttataaccaagtgcaggaagctgtacatttattcttacttttaatatataatatcctgattcttcaataaatacgttgccagcaggtgtttcttctaatacattttctctcggttttacataagtttcttcaattatagtagcatctaaattatctttaaaataaatatttttactatcacttacaacttgtatctctttatatccattaaaacgcttagcttctgtattaaatactaaaatatcatttttagataatttaagcccttctgaaatcttttttacaatagtattttcaatactgtcacatatttcatttgcttctcttatacggtgaagaatataatctgttacagtatcagttacacatccagctagactatcgtgtgcttgtccttccaaaagttttttccatgtatttataagtaactgattgcttatttcaattttactctttttagcaattactaataatggctctattcttttaatcagcttgttttctagtttatcacatgctaattttatatccattctactagaaccaattgatttatgtattcttgctaatacaggttctctaaattcacctctatagctttctagtgattctatggactttatatattttaaaaactcttgatatgaactcgttatatatgaatactttccgatatcattaatcgctttaattttatttttgaaatcacctattatatttaactggtcattcccagaaggtattaacacctcatctacatcagtatatgatttaataaaatcaatagctgggtctaagcgtccattaacatactttaatgaaggctctaaaagcataccagttccatatccatgtggcatatttactgcatatatataactttctccatttaagcttttccacttaaaatatggtgattgaacatgtttaccaagatgtatacctctccaaaagaatatattatcaagacctacatgctttaatagtataggcatctgtgcattaaatccaaatgtatctggcaaatacccaattttcatatacttaccatactttttactttcaaaaattccaatcattaagtttcttaaaatagactctcctctagcaaagaatgcatcagtttgagtaaaccatggtccaatatgtagtctatcttcttttattaactttttaatgatttctattttttctttgtgtaattgtacataatcatccaaaatagaaagttgtccatcaagtacaaaacttacatctggattacgttctaattcatcaattacatctgtaaatagttgttcactaagtactaatgcatctccagaagtaaaataccattctctatcccagtgtgtatgattaacaatatgtgcttttatcatttattctcctctgttctttatcttttatatttaagtctaaactgaatatttaacactttatttagtataagattcatattgaatatagcttataacacgtcttaaatagttattaaattttaagattcccactctgcttcatcaaaatcatcatcttcaaattcatcatcctcaatcactggatttccacgcaatactataactaatccagctacaattactgttccaactgctattgataacacatacattggccaattctctactgtaaaccatccataaaatccactaattggagttgcatttactgaacctaaaccaactgccatagctgaagcaattgctgttccaattacacatgaaggtattacttttaatggagattctaccgcaaaaggaattgctccttcacttactccaattaaacccattataagagatgatttcccagcttcacgtaactgtttattatatttttgttttgctagtatagtagcaagtcccaatcctagtggtggtataactattcctaccattgcagcagtattaggtgcataaattccacttgttaataatgcaagtgatgttgttaaagctgctttattaactggtccacctaagtcaactgccatcatagcccctataatagctgccattaatatctgatttgtaccagataatccatttaaccaattttctaatccagtatttaatgtggcaaaaggtatacctatcacataattgattaatacaacagtgattaatgttccaaatactggtactataaatattggtactattgaagctgctgattttggtaatttaacatgatttttaataaacaaacatgtatatcctgctataagaccaactgccaaagctcctaaaaatcctgcacctatatctttagcaatcatacctccaacaagacctggtacaatagctaatttatcagctatagaaaatcctataaatgcagcaattacaggaaacattaatcctaatgcagtacctccaaatccatctagatcatgtaataatctaacaatactactagcactttctgcgtatttagcatcccatatatctggtatattatagaaagaaccacctacacgagatattgccattatcatagcacctgcaattactaatggaatcatatatgagattccagttaagacatgcttttttaactcagagactatctttttcaacattacatttccctccatttatttagtgtcaattaactttaatgcatcatttattactttctctgcatcctttataggtgcattaactggtacttctagtatttcttttccctcaaaacgttcagcatttctgactttagtatctactgcaaatattactacttctgcaatttgtgcatcctttgtagttaactcattatcgattcctgtagctccttgtgtttcaacttttataaggtgacccatcttttttgaagctttctttaacgcttgagctgccatatatgtatgtgcaactcctgttgcacatgctgtaactgctataatttttcttttcatttctacatctctccttcttcactaaatatattgattatttcttgttctgaattggctaattttagtgcatctacattgtcatcatccataagtttagttgctaatttagataatagtacaagatgattgctatccttatcaatattgcttatagccaataagaaaatactatctactggtttttcatctaaagcatcccactcaatcttatgcttagtctttgcaaatattatagaagattttttgacagcatcactttttccatgaggaatagcaataccattaccaatacctgtagttgaatgttcttctctttccaaaacagacttaacatattcttcttcattgtccacaatcccattttcaacaaatatactacttaatttttttattgtttcttcctttgtatttgtatcaagattaaaaacaatttgctcttttttcaatacatctgatattttcactatatactctcctccaatagcaaatcgtacacttcctttgtggaagttgcacttaatatgtcatttatattttttttattgtcaataaagtcataaaaaacttcatatatttcatcaagctctaggtttttgtcattttctaatgaaataaagaaaataacttccaccttttcatttccccatgtaataggattttttaacgttgcaacagatatattagattttttaatataactaggattagcatgaggtgtagctattgactgaaaagacgtgtaagataaattttctctctcaattgcacttttagctataccttcttttacaaaacctttttttattaggttatctgttatatacttaattgcatcttcatagtttgaagcttcaatatttaacaatatattttcttcaaagattaggtttctgaaagatttatacttcttagaagtacaacatgaaacattttgtatatttctttccaaggttcttatatcactttcatttaaaatagggctaactactatggttggaattgtttctaactctaaataaatagtacttattactaaatctgcatcaattttactggatactaattcttgtacggaaagtactttttcaatctttatcattggaaagtatttttttattcttgcagacaataacctagatgaacctaatcctgtactgcatactagaattactctaatattttgtggaagttctttcattctttctctaaaagcttcaaaatgtaatgctatataagcacattcatcatcatttattctaatatcatatataaattcaattactttctttaaatctaaagcttgctcaaatgataaagaaaagttttgtttgattgtatttacatatgggtttttaatactaagtccatatttcagtctatttattgatgaatgtacatgtgaagtcaatccatcaattaaatccttgtcataagctgtctcatacaatgtattttttataatttcccgaagatttgatatattatttgtacttgtttcacaaggattagttgaagtattttttagttcattagtatctctatgttggtcagccgctactaaatgtaaatttatatatccaatttcagattttggtaataatattgaaaatttttcttctaattgttttgctaaataattggtatttgacatttgattattttctatattaccaatatacaaactttcttctatatattcgccttttctaattctctctacagctattgccaaatgaataactaatgactgaaattcataatcagagaactcaaattttctttctctgctgaaattcctaagaatatcaataattattgataaatcatcttccgaaaaaataccatttacatctgcctgtatcttttcaaatgcttgataaaagctttcttgctcttgcttaatataccagtttctactccaaaatttatgtataaacttagcagtaagttgtcttttatctctttcacttatatttaactttattcccttactaggtttcttatatatggaaatcccttcgttttttagcagtttttcaacttctgataaatccctttcaatagttccacgacttatatatagttcatcagaaagttgttgtatagtaatataatcattactctttaaaagtactgaatatatatagataactctctcctctctggttgtaggaatttgacttcctttattatctaggtaaggaagtattttttttaaatctccatcaatataaacacctatcttaggttttcttattaaagaaagacctatctttttaagcactgcttctacttctttaagagattttgaaactgttttttctgaaacatctaaatcatctgctattgcttttacagttgtatgaccttcttttaataaaaactttattattttaatttcacgattttgaatcatatcagttaacattttcaattttactccttccctttatctttattttaatggaaaatgtttttctaaaaaactactaatatttcctgattaaatacggtaatttttatgtattgaacactttaattttagatgataaattaaaagctgtctaaatttaatatgaaaggaaatagtttaatgctgacaataattattgctttacttcctgtaatgggatggggattgatgcccatagttgcaaatctaaagaaaagttctcctcatgaacagcttttaggtacatccataagtgcgtttatattttccactataataactctggttatacatcctgaaattacatttttttcattttgtataagtatgatttctggcatattctggagtttgggacaattaatgcagtttaaagcaattcaaattgctagtgtatctaaagtaatgccaatttcaaatggttcacaattaacttttacgacattattagctgtaatcttgtttaatgaatggaccagttctaaaatgttactgattggttctttatcaatattatgtataatacttggtatacttctcactaattatcaaactaaaaaatctacagataaaaatatgttaaaatgtgttggagttgtattattatcatctctatttttatcattatatgttgtaactaatcaaatatttttaattgaaggatatagaattatattacctcaatctgttggtatgttgataacttcatctattattgtcaagtatttttctaaagagattgtatatagggaaaatgttttattcaatttaattactggtatattgtggtcaatagcaaatttaggtatgttcataacgactaatacattgggagttacaataagtttttctatctctcagagttgtgtgatagtagccactttaggagggattatattttttaaagaaaagaagaacaaaaaagaatggcttgctatttttattggtataatactaatcatgtctggtgtctttatgttgagtattataaaataggtatttatttacactaatcatatatagttttgtacatataaattaactgtttctatttatttaaataaatttgcttatatacttaaaataatagcatatgtatttatgaaattaaaccacactctaaatataagtatatttcattaaatacatatgctataaatttttctatcaatacgagaatatcaagtatcttatactataagtaaatttaactttataaattcaccaactaatattacactatttgatattaagtttttcatcttctataagcttatctgcaacccactctgtaacttgacctgttattttaatacagtgctcttttctttcgggagacataaagttatcaccatcccatttctttgtaatagctctacaacatgttgcaccatactcttttttaatataatcatgcaaacctttagcatgctcaaacatctttggattcatagtttctccatgtactcttccatatactatacctaaagccatctctcctccagatatcgctccacaaaggcattgagcttttccaagtcctatcggaaatcctgatgctaatttagttatctctggacttaaaggttggcctaaagcatcatttattgtctgaagaactgcttcagagcaaaaaaactctccttttctaaagtattcttctgatatgtttctaacttcttttaaatattcttcttttgttttcatttgttttcctccaataaaattaagctaaattaagtttctatggtttatcttatcttcatatatttatatcaatattcctattaaatacacatatttaataattcttatttagctttagatgtagtttcagatttactaagatatataataaataaaactaaaacatataaaataatcactgtagcaattatctcttctaacttagaagcatatgaaatccaacttataaaatgacctgatttagttaaataaccattcattagtttcatacccattgcacttattgccatagggaatgtaaatgcagcaaaactcggataaaaaggcaatcttaataatttcggtaagtatcccaaaactataatataaaatacaattgataatatgaataacaagtataatactacattatttttatctgaaaaagaattaatatatccagacaataatagtgaccctggtgcagctaatatagctatacttggtaaagatggttcaggcatttccttgattatccatactctctttaaaattactggtataagaactatataagatacaaatcctatccaaaaagcaattttgccaatcaaaagttgattaaatgctggtgccgtaacactagctgcaactatcccaacatatactatataccaagatggaaataccgtttttattgagaatttaactaagaacttcttactaaataaaactattaacacaagatgacccacaattcctatgctccaaatcataatacttaattctaaagataatggttttatatatgtagcaaatatcattgttgccattgttatagttggaaatgtacttgatattaaagggttctctaattgctctttaacaccctttctaagtaatattattttgactatataaattgcatacaaaataaatcctataaatccaattacattacgtaatgattcactataagattgtaataagttacctaaagtaaaaattgacaaaatcaaacttgcaataggtataggatatttttttaataaattcaagttctgcctcctttgttactaaattatttgtgttttaattatatcaaaaagatggtcaaattgacatattatgaccatctttcttatatagaaaatatctattaagtttaattttgttatcaaaagtatctatattcttgatatattaaggtaattagtatatttattttaatcaaatatactaatttgtttattcttatctactttaatagtcttcatatctctaatgcttatttttgcatcatctcttaaagtatctatgagtaatttattatcttctttataaagcctacagttttcttctacttttgcataattaaagttagcataacaatacagacaataatgtctgcaagtattgtattgtcctatatcgacacttttaacacatccacaaatatctctttgtgtactatctttttttacctctacttcacatcctataatttttgatattaatctatcatcaatacacttactttttccaatcccaaatttacttaaattatattcttcagaacacatttcaagtattatcccatgcttatgagcaatcttagaaatttcttttgataatgtttctatttctgtaatttctattggctttatatgtaatgctttagtattaaattttgttttcttatataaatcgataaaacttattatacatttttctgtaaatccatcaagctgattacataaactcgcaaatgctttgatatgataatctactgtgtacttttcacttaagaaaatcgggtcgtatcttaaaattactctttctttgcctatttttctagacaattccttaaatgaatctattacctttcttttatctaaaatacatgtctctacttcttttccatatgatgttatagtatagtgaaaataatatttatagtcttttaatttatttaaatcatataacattggagttacatcctttgtccaaaatacaaaacaatcaacagtatgtggatttaactctatcttactaacctgttttggattcattggattaattacataaacaaaaccttctttaagtctgttaaaaaaccacttactatagaaagcaggtatatcagttcttctactcacacttactatcatatttaacctccatagtaatataattatgtcctaatatatttttaatataattatagctctaaatacttaatttaatcaaaacatttaagataattccagtatgatttactgattcatttctagcatttaaaatatccttaataaggttataattctttaaaaataaatatacattattcctaaactttcaaaactaattttataatgaaactaaaaaaggtgctattttcaagcaccctacaattttactttttaacaaatttaatactatacaaatataccaatattacattaaaggtaaacactatatattaaaactttatatcattatataatacaaattttattttatttggtttgttttatctggttcatgatgtttataataatataccgtttcttttccaattacttcagaaccaagcttctcccattttcctccatagctagtctctatttgttcacattctgaatctgttgatgctacaataagaccataattaggtctgaatatagctgtttcttcctttccatttttataacttaatttaccattatttaaccttaacaggtttccattcttttgataattaaaattaattccattaataacttctggactagatgaatcaataaatatataattgttaaagttattttttaacattaaattacctcctccatgtaccgatttaacgatataatcataggcatctatattgcatctcaatgttaattttggtatttgaagggttttaaatacataaactttatgtttatattctaagccatcatcccagttatccttattatcactaactaaatcaatattacattctgtaaaataatttccataaaataaagaatatgcttcttctactctatctttaatacttaaatatgtgtcataatctgtattataataatactgcccacatcttcttataataccagaaaaataactacctttcactgagtcaaataaaaaaccacaatacccacattggtcaatcgtaatattattaattttataacttccatatccctcataatccttaacttgactacttataagaccaactttctgtattttttcaattcttacattatttatgctagttccagttctaatcctcattccattttgacacttagatattctactattagaaataattgtgtctattcctgtatcaatacccaacccacaagatgaaactgtaatatcatttacaattgagtaatatggtatcctaattcctgtacccgaaaaaccacttatataaatattttcataatgacctagacctttaatcatattcttactattatcatacagaattgctgatacattattcatctcaacatttttttcattcttattaataatcatctcataatgatatttaggattaccttttgtcggtggttcttcatttacctgtatctcacaactatcagaatagaaatttatatttttaatacattgtttcttccctgtcaatgtaataatactcatattttctactccacgagttataaattgtgtagtctctgtaggtgaattagaatcaccttgtaatacaatttctttattaattttaacaccacttgtaaataagtattttccttttggaaaatataagacacagaaatctgtttctatttcatcaataatatcctgtaaatcaggacctatgttgtacgaaccatcatttttaatacctctttctactacattaatccatcttccatctttaatcccagttcttccttccataatattatatattcctttcccatttacttaatttgaacctaccatgactaaagtcacaggtttactacttcatagaattttacataatcaaattaattttttatattatttttatattattcaatccatgctattaccaaaccatttacattaaaactatagtcctagctctccaataaaatacatctattcaaatactacgtatttacttatttctctatcaatttataatagtgtacagttattccaaactctattttttcaccaattttcccccatgttcccccataatgagcggaaagtatattttcatctttaataattgttgacataatgtcacctacctctggtttatgcatcttaataaccttatccttactatttatatatatatttcctttttttatcttgactttatccccataatcttcatcagatataccaattccattgatactacttagttttccatcgtaaaatataacagtttgtcgcatattattgtacgttaaatttcctttttctgacttaacaatccagtcagtagcatctatattgcatgttaatagtacattcttggtttcaagtgcttctacaagatacaccttatgcttatcctctttgaaatcttcccaattatctttattggtatttgacaaaactatattacttgactccaataaattaccatagaataaagaatatgcttctttaactctattatccaacattaaataattatcatagcttacatcataatagtactgtccgcaccttgtgatatttcctgatatctgaacattggatatagaatcaaaccaaactccacaatatccacattggtcaattgtgatatttgtaataaaatttaaacctctaccaatatttttaattccaactttttttatttcttctaccctcataccatttataaaagttccagtagaaattatcattccatcaacacagccccaaaccttactgttagcaatcgttgaattttcccctgtactaattccaagtccggatgtaaaaactgtaatatcatttgctgtagaattattaggcatatcaagtgcaattccagaaaaaccactaaaaaacaagttttcataatgacctggttctccctgtttatcttcacatacaatagccgatatatttctataatttataattacattatgatgaaatctaggttttccatctgttggaggttcatgattagatgtcatatctctatcacaactatctgaataaaagcaaatgctcttaatacagtgtcttacactttttgctgttataattgctatattttcacttttaggatttttctttcctttaaaagtaaattgtgttactccagcagtgtttttaggaacattcgccaaaatataagaatctccacataaggttaatcgtttcttaatcttaacaccactttcaaataagtattttccttttggaaaatatataatagaatcttctggtgcagcatctataatctcttgcaacttggaacttacatcttttgtttcatcattacaaatcccataatcaagtacattaatccagccacttatatctttaattattatagactcttccattaatcactacctcctagtttgataatttaatcttttatctttttataatagtacatagattccccagctaatacttttacatcaatctgttcccatattccaccatgtaatttatttatttcttctatagaatctagtactgaatatattacagtattcttttttaatctaggaaccattaagtacttacctttatcatctatatacagagtgttctcgattattttgattaaatctttttcatctatatcagaaatttgaacacctcctacagaacaaatctcaccattataaaatttataagtattttcaccattttctagcaacaagttgccctttgcgcactgtataagctcatctgcttcagcataacatgttaacattactttgtttgtttcatttgccttgattacatatatcttatgttcatcaagtgaatcattttctaaggtatcaatattactattcatcaatacaatattgcaattttctaaaatatctccataaaaaatggaataagcttcttcttttctatcttccatattctcataagtattataatcaacacttttataatactgaccgcatttagtaattctggcagttatctggctataacacattttttcaaacataaatccacaatatccacattggtcgaccataagattcataatcaggttaaaaccaaatcctttattattaatacctatttctcttatttcttctattctcacattatttaagctaacaccagtagtaatctccattccatttttacattcataaatcttgctactagaaagcattgacttctctccaagcctcataccaagaccacatgaactaacaatgatatcattgccagttgaatagtatggaatttcaatccctattcctgaaaatccagaaataaacaggtgttcaaagtgaaatagtccttgtgtttctccatattctgtaatagcagatacatttttaggtggtattttctctatatcatgactatcataataaaaattaatatttttgatacattgacttgttccttccaatgtaataatacttatattagaaactcctcgggttataaaattggttgttcctacgattgattgttttttatctaaatttgatacttgattatctcctccataataagaatctccttgaagtgttatttgttgactaattttaatacctttctcaaataagtaattaccttttggaaaatatataatggaaccttctagtgacttatcagagacaatatcttgtatcatattacttacatcatatttccaagtaatatctattttactgtttaattctagtacattaatccaatctggagttttagtttcaatttccatgattaattcctcccttttaaatctaaattcttttcacagaaaaaattttttgactataaccgaagtgacttttactctttttgggaattttgagatgacaattttcattttacaacatcattacagttatattataaatcaattataatctcattatatttttactattagcaagttattcttaattttttaatacaaattttatataatgattaaaatagttaagctttgtatcaatataatttaatcccaatagaaaaacactcatttctgagtgttctatacaaatttttattttgagaaatcttatataatcttacattttaaaaattttataatattcaatttaataccttctctagtaaagttatttttgatttgcatatcttaatgaccatgggcaactcatcatacacctcaatgcacaaaaacactttgaaacatcaataatagattctctttttccaggtaaagtccattcatttccatgtatagcttttgcaggacagttctctacacaaacattacaatttaaacattttgaatcaatcaaaggatatctttcaacagaaattggagcatctgtaagtactgtacacatgctaaaagcacatccgtattcctctgttacaaacaaattattttttcccataaatccaatgccactaatatttgctattgtcttatgtggtaaaggactaatccctgattgcatttctggattaatataggctttttcaaaatatccatgttctagattgtttttctccgattgagaatacgctctatatcctttattttgaatatattttgaaatccagtcagctaattcttctactttctcctctttttccaaaaactcatcactatctgtaggtaagttattgtatatatctgtaataaatttttttgataaccctatacaaaataaaattgctttagaaaaaccttgtgtttgatttattggaaattcagatatatcaacaaagcgaacaatgtctacacctttattgtataaaatagattttaattcatcattcatatttaactcctcccccctagataaaaataacattacacattagtaaaatttattattttaattatgttaaccaatactttgtacattctttatttctactcataaagccatactcaattaaatatcttctaattgttgcaaaatcatcatatatagattctaaaatctgattaacttccttttctgaatatttcttcccacgttcaaattgttccaaaatcttagataaaattacgacctttttcttttcttttgaagaaaatacttttaattttaaaggattcatactttcaaatgatgtatccaaaatgtgttttctctcttcttcagttactacatatctttcatctaccattcgagcatgttcatggattggtattatagtactacttttattagatttatcttcaaatacagattcatatagtgctaaatagagcttagcctgttttgctttttctctgaaaataaatttttgatggcgtatagtagatgtggatactccaacctgttttgctatctccttatctggtaaatcactaataaataattgaaataattgtttttgattttcagtcaatgtgttgtactttgaatcactattaagcaattgctctaaataatcactatgttctaattccatatgaagttcaatagcttttgaagcttcaaagaatctattacctattttatatatttctcctacctcatatgtttttgtacatttaatgcaactataacaatttaaatcatcattaaatatatagcctcgtttaatatcatcaatagaaagattttcaattttcatgttactacctccatttcacaatttacatttttcataaatatattatattaaagtttattaatataatcaacatttttattttttgtttatcaattctaattatttattaatttgaaattacaaaatataaaaatatatttaaacaaaactatttagatttttagctatataaatacttatttattctatttattactaagtgtttttctatataaatctaaacaatatttacaaaataaaaaaactccttaatttataattaaagagttcttttttatacaataaatccatacaatcaatcttataaaacataagtttataggtatttataaatattaaccttgtattttaattctttatttaaactcaattacagtatctttcccaccttcaacgctattgcctacattacatgtattcatattgtactctgaatgattagttattgtaactggagtaataagtgatataccctttaattcaatcaaaggacggttaattttcaacattggtgttccttccttcacttgttctcccatactcaccaatgcctcaaaaccttcgccttttaaatttacagtatctaaaccaacatgaataagaagttccatcccattttctaattctattacaaatgcatgtttagtctctgctactactactatctttccattgattggagcatatacaatgtctcctgtagaatctatagctacaccctctcccataattttttgagaaaatacaccatcttgtattttagataactctattacttttcctgatatgggtgattttattgatttttttttaaacattttgaacataaaaactactctcctttttgcttttatccattgttagctgtttttaacttctcacctaaacttcctcctggatggtacttataaaaatctgaagaaccaaaattactactcttagataatgcacatgcaatagaatctcctaaaaccaaagtaattgtagatgatgttgttggtgctagatttaaatggtctgcttcatcctttgcaggatatattaaagcataatcacactcttttgccagtactgaatttctgtttgaagtaaatgcaattgtcttagaacctattgctttaatatattttatacagtttaccacttccatagaatttccactatttgatattaaaattgtaatatccttactttcaatcattcctaaatctccatgcactgcctctgttgcatgtacaaaaaagctaggtgtaccagtactagcaaatgtagctgccaatttcttacctatatgtgcagattttcctacacccataaaaattactttgccttcacaatttgcaatttcactaactatactttcatattctattcctgcttcatctattaaacatcttatggcattcatttcagtagtcataacatcaaccattgtttttaaatatcccataactatctcccttcctactataaagttctttttgcaatataatccatagtttttttaatcctatttaaaccatcttcaagtttttctcttgaacatgccacatttaaccttaaataaaactcaccttcttcaccatatacagaccccgacataatagcaacttctccaatatccatcaataatttttggaatttctcaccacttattttaagttcggaaaaatctatccaagcaaagtaacagccttctggcatgaccaatttcaatggttctaaattatcttttatataatcaatcgtatatttaagattctctttaaggtattttaatagttcatctaaccaatattcgcagtcatcataacagaccattgtagctaatattgctagaattgctggcgaatttacaaaatcacggtatctagtgatattttcaaatttatttctaataccttcatttggtataatcacatatgacccagtcaatgctggtatattgaaagatttagacgctgatgtacaaatgaatacagaatctaaatagtcctttgcaacatttaagataggtgtcattctattgtcatatacaatatccatgtgtatatcatctgatattatcttgacatcattattcttacaaattcctatcatcttaacaagttctaactcactccatactctaccagttggattgtgaggattacataaaataaatatcttagattttttacactttttctcaaaatcattaaaatcaattgaatagaatccattcctatttacaagatgtgactttataatattacgattgttatttgttatcacatcataaaaagcattgtatgcaggagtatttataaggattccatctccttcattacttaacatctcaataagtttgctaattgaatacattacacttggactataatatatccagttactatcaacgctacaattaaatcttttaatataccaattcgtaactgaatttctaaaatcatcatgtttccatctactgtatcccaaaactctatgatttaacctttcctgcaacacctctgttatttcaaatggaaactctaaatccatatctgaaattgtaaaaggaagcaaatccttcttaccaaatctatcttctacatagtcccactgggtacaatatgtacccaatcggtctacttttttatcaaaattaatcattacatgcctccaaatgaccttccatagctttatccatctgctttcttaaagaatacacttgagttcctataattacttgtattgtatgctcatccaatttaacaactgctataccaccagcctctttaattgcatcctcatttattaatgatacatcttgtagttttaaacgcaatctagttacacaattatctagtgataatatattagattgaccacctaaagcagatatcatttgttgtcctttatatgtagacaaatttttgaaatctgaaccatttccttcagatacttttatttctttatcctcacgtcctggggtctttatattaaacttaataattgcccacttaaatacaaaatagtatattgcaaaatataaaactgctactaatactgctattggccatcctgtagctgttcctcttaacacaccaaaacttataaatgcaattaaatctcctgtgaatcccatcaacacgcctaagtatggaagtaccatgtttgctagaccattcataaatgtatggaaagcaaataatgctggtgatatgaataagaatagaaactctattggttcacttataccacctataataactgtcaacactcctgatattaaaagtcctttaagtgcctttctattttctggttttgctgtacggtagatagccaatgcagcaccagctaatccatattgaatcatcaatttaccttgttccattttaccagctaaatcaagaggtataatctgattattttctacatatgccataaacatgttcaatgtaccaaagtacgtttctccatcaataacagcagttccacctattggtgtaaaacggaatacagatgttacaagatgatttagtccaaatggaattgtaactctttctgccactgcatatgaaaaatatcctaatggtcctgctgaagaaatccatcttcctaaactttggaatgcattgaaaaatggtggccaaacaataggtattaataatccaactatactcataactattaaactaacaattggaactaatcttggtccactgtagaatcctaatgattctggtatctttaaattactaactttatcatatattgcataaacaattaatcctgctacaataccacctaaaacacttgtattatatgtttgtatacccataatcatagcttgaccattagttgacatctgttctgctggtactaacaaatcagctcttgttaaataaaaatttgtacctatatgcattgctataaatcctactaatcctgaaaaagcaccaaactctttttctttttttaataatcctagtggaattgccattgcaaataatgctcccaagttgttaaatgcaaataatcctattgttaacatgaagtttaaaactaagttaacatattcattccctagaaatggaaccatttcaatcatcttagggtctgtaaaacctgccccaagtcctagcatcatcccagaaacactaagtagtgctattgggaacataaacgttttccctaacatttggaagaagttccataaacctaacttattttttttcataattttcccctcctatttttatctaaaaacataatcaaatttatagaaaaacctaaatcaaaaaacttaatttaataattaagtttaatgatttaggttttgcctgctcaaccagttacaatcctaaaagtcactgtctgtatttgattgtatctaataaaaaaacctaaatcaaaaaacttaacctaatagttaaattcaatgatttaggttttgcctgcttaaccagttacaatcctaaaagtcactgtctgtattttgattgtatctaataaaaaaacctaaatcaaaaaacttaatctaatagttaagctcattgacttaggttttgcctgctttatcagttacaatcctaacaaccactgtttgttattttatttatgtgaatcattaaatataattcttcttctttactaatcttatattcaaatctgtctaataccaatgctgcaatttcttcagtacacactttaggtttattgtaatttttattcactaacttatacatatcttcaatatcactatcattgtaagtttcttttcggagaatcctttgaacaaaaaactttaagtgagttataagtctagtataatttaatgaatttacatccaatttaaatccatgtacttcttcaattatctgaataacttgttttgaaaactctagtatattaataccttcatctttttgagaattttccaaaccattgattatgtgaatagcaatatatcctgcttcatcttcaggcaattttattcctatccttttttcaatttcatcaattgcccataatccaaatttaaattcttccctataaagttgttttgtctcattcaatattaagtttggtaattttataccttgtttttctctttggacagcaaattctatgtgactagttaaggctaatattattgaatcattcacttgagtatttaaaacttcattagccttttctataatttcttctgaaattttaaagtattcaatagaggtcttattaagtatttgattgtatttgtccctttgatcgtcttgaacaaaatatttcttagaaatcaaattttcatctatcaaatcgcctacttttttcttaaatcctactccagcaccagtgacaattatttctgtgccatcttctagggagcttactactacattgttattaaatatcttttttatattcactataaatcccctctaaaaaaattctctcatcacacttacatagtatagtatatttaatttaatgtcaatatttaaaattttactttcgtatatattttgcaatttaccctataatactacaataacaaaatattttttattgtcatcaattaatttgtcatattttatcatattttcattgaaatatatttaattatttcttatgtatatttaattatttaaaatcaatcgacattttatattacaaaaattattttcagttttttccagtattctcaagtattttaacttaattatatatatatttattgaaattcagattatagctttgtactaatcttttctcaaatatatacattggtaatataatttttaatttatataaattaaattaaatttttttataattttttttataaaattatttgtattatattttgtattttttataaaattattatacttgtacatcttttataacatataaaatctttttttctaattatatacaatatattttccattatgttctaatcaatttctttactatttttacaactttattagtcatattcataattatttctaattagtgtttaacattttatgtaaaatttataaaaaaatgtatataaattaaaataagtgactatactaaaaatatgatacggataaacaataagttcaacctatctcccccaaaatcaagtgagctacagtttcccccaactgtagctcattttcgtgtaatttaataaacatctcaacaagaattaattaacaaaaccccttataaaaacataacatatattaaacaagctcttgattaaaacttgagcttttttaataaaaaacagaatagtttattagataaggggtttttttatgcaattcatggatgtatctaaatacattgaaggtgcaaaccttaaagttaaaactaaaaatggtgaaactgttaaaagaatatattttaacaactctgccactccattagttttaaaaaacgtagtggataacttaaactgtgagattccttggcttacttatattaatgctccaggaataatctcagaaaaaaatactttaaaatatgaaaatgtacgctctactatcctcaaacttattgatggagacgaagaaaaggattctgctatttatgtcaaaaatgctacagaaggaataaacttcttagcaaaattttttaaagatgaaaatccagataaatttattattaccacagcaatggagcatatggctaattacctaccttttaaagttaattttcctacaaaagttgttggaattacagaaaaaggagaacttgatttatgtcaattagagaatatacttaaaaattatgctggtaatgtatctctcgttacagttacaggagctagtaatgtcacaggtataaccactcctatatatgaaatagcaagaatagctcataagtatggtgcaaagatattggtggatattgtgcaagtaattcagcataaacctttttcaatgatgccacatgaatgtgatgagcatatagattttgttgtttttagtgctcataaatgttattctccactaaatggaggagctctggtaggacctaaaaaattctttgaaaaatttaatcctgtactatatggctcaggttctaccaaatttgtaaatgataacaaaatactatatgcaaacgtaccccaacgttttgaagcaggatacccagagtattttggaactcttgcaatgggaaaagcactgaacactttaaataaaattggtctaaacagaatttcaaaatacgaaagagaattatttttatatgctaaagaagaaatgagtaaaatacctaatataataatatatggagataaatcaaataatgtaattatcccaaatatatcttttaatataagtaatatgtattacaaagatgtagcaaaatatttagttgataactttggaatagaaactggagctggagtagtaggtgcagatatttatgtacaaaaattattaggtataagtccaaaagaagcatacgtcagatttatgagggaaaatcctgtaggtcttgttaggataagcttaggaatgtacaatacttttgatgaggtggatagctttatacatgctattaaaactttggcttttaaataagctttttctattcttttttatcaataaatagagagtagttttgttttcacaaaaaaacaaattatatcaacagtcaatttcattagcaattagacactcatttgtaactatacaaactattttacactatacaaataaaaaactcattacaatgagtttttttgtttatatatgatatttattttaattacttcaatttactttaattacatatatgattcaattttgttttttaaattctccttaggcataaaacctattaatctatctacaggttttccatccttaaatattagcatagttggtactgtagatacttcaaatttctgagctaattctatactttggtctatatccaccttcaagaagtttgctttttcaaccatctcatttcctaaagcttcatatattggtgatagcatcttacaaggtccacaccaagtcgcaaagaaatctacaactactaaaccatctttattttctacttcatttataaattcattattatttattatttttaccataatatacatctcctttattatcttcttgatactaatatactacgccctatataacagttcaattaggcacttttttgtaaccgcctatttttaatagatttaatattatgataaatagatttataagattaaatatttataagactaaatatttctgatatattttatttttttcttaatatagttgacattttctcccttaaattataaaatcaaattaataactacataggtagttactaatcttttatcaaaggagtttctatatggataatataattaatgaattacaaaatataggatttactaaatacgaatctcaaatatacatatcattattaaaggaaagccctttaacaggatatgaaataagtaaattatcaggtgtaccacaatcaaaagtctatgaaaatataacaaagctattaaacaataatataattatcaatgttggaactgaccctattaagtacatacccataaaccctaatgaattattaaaaaataagaaaaaagaatttgataattctatggataatctaaagaatagcttacagatattaaataaaaataaaagtgtagaatacgttttaaacataaaaggagataaaaatatattaaaaaaagcattagaaatgataaaaaatgcaaaacaagaaattataatttcttgcccttatgaagaaattcttgaattaaaaaaagaactcctaattgcttacaaaaaaaatattaatattgaaatactacttttagaaaacaaaagtctgaaaggtcttgataatattcatactcatggaggtaataaaactacacttgaaaataaaatgctttacaaaggaattattttgattgtagataatgatgaaatattgacaggaaacttatcagaaggcagtgaggccatttcaatttggacaaaaaactctaacattttatatattggagttcaatacataaaacatgaaatttatatttcagaacaaataaaaggaggttataaaaatgaacaaaattaagattaaacaagttgatgcttttacaactataccttttggtggaaatcctgctggtgtcgttactgatgcctctaacatttctgatgaaattaagcagaatgtggctaaagaaatgaatttatcagaaactgcatttgtttcagagtcaaatgttgcagattttaaggtacaatttttcacaccaggtttagaagttgatttatgtggtcatgcaacaataggtactttccatgcacttttggaagaaggaaggcttaatactaataagagtatattttatcaagaaacaaaagctggtgtattatctgtagagcttaaggaaataaataatgaaaatatatttatgatggaacagaatacacctgaatttgaaaatttagataattacagaaaagaacttgcacaaatgataggtgtgcatgaagatagacttcttgaatatcctattataaaggtaaatactggactttggtggcttgtatttggtctaaaatctttagatgatttaaaaaatatctctccagatttaaataaaatcaaaaaatttagtggtgataataatataattggtataactccattttgtatagaaactatagataaaaagtgtgactaccatttaagatctatagcaccatatgttggagttacagaagaccctgtatgtggaactgggaacgcttgcgtatcatcttatatagtacatcacaatattttagataaaactagttttattggtgagcaaggtaactttataaacagacctggaaaggtatatgtaaatataactagagaaaacaatgacataacttctgtaaaaattggaggaagtgcttatactgttttaagtggtgaaattatgtattaatcccatacctaataaaaacaaataaaaatactagctaactaaagctagtatttttatttgttatttttatttaataatcacactctaacaaatattataattatatatatcataatattgtatttagaagtaaaattttatttttattattaattagttataaatcaatctaatacaacataattacagtagattaatctataaaacataataattacttactgattatttatcatcctcaacaagtctacttaatgtcttatcagataagaataataatatcgctgcaacaaatagtattactggaattatagtatatactttaatcatatcaaatttaagagtaaatgcatatatatatccatatcctttaccagctataaaagtagcaaatgtccatactcccataagaacacctagaagcttcttaggtgcatacttacttacaaaagagttaccaagtggtgagaataacatttcaccaagacttaaaagaataccaaacatgattatccatagtatactagctttagcagtttcaggagctccaactcctcttgaaaattctgcaccaacaagcattaagaatgcaagacctaagaatattaatccaagacctgtctttttaaataaactcatatctccttgtggtctactagcaagtttaaaccataatgctccaagaactggtcctaatactatacatacaagtgaatttaatgagtcaaaccaagcaagaggaacatcaaatcctccaacattcatgtttacaaatgctgcaccataatcataaactgcaagataagttagataccagaatacccagaaaattacagagaagaatgatataagtataatagcccaaattctcttcttatccatgcttgtaagaggagacttatctttttcttcaactttttcagcaactacaccttctttaaaaggtctctttcctgcatttccaaggaatctccatccatatatgaaccatattgcacctattacacaaagtacagctgctataaagaaacattgagaaaatccaagtacaccattttttgcaaatgttttaaggtaaagaataccaactgctatagtaccaataaaagaacctatattaacaaaagaatattgtactgaaaatgctgtatcaagttcttcttgactatcaaaaagctgtccatttaccgcagatacgttacctttaaagaatgcagtaccaatcgaaactaagattatcattgcatttaccatagaaactgtagttgcaatagaaccaagatagtaacctacccccatgataagcatacctataggtatagtatatctagctcctatccatctatctgatatatatcccccaattataggtgcaaggtatgtgaatgcaacaaggttggcttgcattatagcagcttgtcctttatctattccaagaccaccatgaactatagctgttgtaaggaatatatatattaagtactttgaagcataatatgctgctctttcaaatgagaaagttgttgagcagatataaaatcccataggaaatttacccttcttttttactgttgagctcataattttaaatcctttcttaattgtatttttattttttacgttttgtccaaattctttcttttatgaaagatataatattattattttgtaaaacaatttgtaattattattaagataattgcgcatttatttgtagagtacatattctcatggaataaaattaatacacttcttaatcataaatttaaattatataaattcactattttcagatatagttataaattaatatattctcatctaataccatgaaaaaaccttcgccatatgcaattcttattttttacgtgatagtattttacaaactaaaatcccccttttgtagcaacttctgtaattacattttagtgcttttttaaaggagtctcgaataaagcaacatatattttgttcaaataatgtttttatttactttttaaatttatatattacttcactcaaccaattctcaacttaaataaataaactactatctattcacagattagacctatttcttacacattagtttataataaacactgtgaatctaaacataaaaactgttattttaaagtaattacccatatattcgctttgatactatttattgaggttatactctttatttataatatattatttataaaatacctcaaaatatattattaataaaatacctcaaactgaaaactttttcacgaatatttatttttcacctccccttttttattttaccatgtaaatcgtaccataaatatgcacttatatgcaagaaaaaaatctattaatcgacagtaaataattagaaaaatttaaattatatttgttaagtgtattatataaaatatttcctatgaaaatataaattaaattaatgttcagaatagtttttagatatgaaatcttgatttttttattactttacttatttgctcaaatatatttttgtatgcagtatataataatcaaattatacacttcttataactgcgttgatttgaaaataatattaatagttaatagaagaaaaaatttaaattaatttttaaaaaatctattaagttaattgaatacttttttatgtatttaattaattttataaattcaattattttctaaatttaggtatgctttactatataaaaatgattttttatcttaattttctaaatataagtgaatgctatcattttaagtatcttataagcaatgtaactatatatctctaataactacttttttaacatgcttaaactatttataagctattatatttatgtattaacctaataactttttcactaaaaaataacaatctattcaaagataaactatagtacttcttctactttgtttcaataaaatactaaataaatttcgtacatccacaatttttcaggctacactataaatatacaatatttatcttagttataagtttaagaatatttttagtcttattttgtcgaatatatttttaataaaacttcataattctaagcatatttttacactgtgttttcatgtacaaaaataatgcttacaaataaacaacataaataaaacttaaataagatggattctattcaacatagtatccatcttattcattcaaaacctaaaaggattttttataatattatatattttaaaatctaagtaactcattatagtatcaatttcacttaaagcttacaatacacttattaatcttgctttatattaaaaacatctacaataacaatttaaatctttaagtgatatccatctcacacctaaaggagtgggctctccgcactattctgtaattcttcaatacaatcattcttaattttttatataatttaattatatattttattttaccaaaaccagcatacataaataatacttaaaatagattaaataaaggatactaaaacactttattgaggtatatgacttgaaatatatgaactaacttcattaggagaaatatctaaaatagttgcaaattcttcacttaataacctttctgcttctttcattatattatcatctgcttgatgtgtttttttaccaatagattttacatactctctgttattatctatacttcttactaattttattaactcttcacatttaccacctctgagtatttttttaaattgctcacttcttaatttttcattatctatccatgatgtatccatattaggaatatcatttattaatgaaagcacattaattttagaaagtaactttctcattggtactttttcattatctacaggaatttttattactgtattattagaataaataggactcaatacataatactctttttttattccatttgtaaatcgttcatttgttatatccatgactttgcagactcctgtcataccatacattatataatcatcaatcttaaacaaaaacatcaccatccttaataaaaaaaatagttttgacaactaaatccatcttgccaaaactatctgctatatattatattttaacacattttaagacttaaatgtaagtaaaacttatattattaaaattaaaaaatacattaaccattgattaatgtattttttagatttttataacaagcatatcaaaataaattaatacagcttatctcctgtgaatacctataaaattggtgcttggctattcattgagtacccatcatttcttacatcatttatttctaatatttcatcatttgttttaaccttagtaagttttttaactgctccataaggttcttttaatgaaattttatctcctcttccagaaataacccataaaattttataccctctaggtattacttgtagtttattttcacctttaccatcagtaaagtagactaacaaattaatctttttattattagcatactcaaagactggagaaaatctagtacctccacctatcctaattctatcttttatatctttttcagttctcactttatatacacgtctaatttcattatcacattctataattgtaatttcatgattatagtttttcactatactaagaacttctttaatagcttgtttaaattcttcatcactaatacttccacttacatcaagtgcaactgctatttctgccttatgacttctaagttctcccctcaaatctaaacgatttggttgtcttctatttcttcttgttatagtcttctttttattattttcaactgttcccattattctattaagatataaattccatggcaattcacccttactatttttaagtgatgatatcatactttctaaataagcaggaactttacctttttgagaactgttaataaatttttcagtaaattctctaagggtatttttatctatctcattggattcatcccatatatcatgagttctttcggggctataatcaatttctacatctccatatttatcactatcatcttcctcaccatcttcatccacttccatcaaatctaattcagtctgaatcttttctacataatattcaaaaggttcatatggttcaagttttaaggaatattttaaatttacccactctaaggtagttgcatatggtggtaaattgtttagaaatttatttactactatatccattgccatattaattgccaatgtactatactttccttttaactcctttgctctcatcaaatgcatagataatatatgatgaatttcatgtttaattgtagtctccatttgctttatgtcaagcgttaaaaagattattggattaaaatatataacatatttagctcccttaaaattcacgcctgtaggactacttatatcaaatcttatttctcttgacatctgaaacaaaaaatatccataaaaattatcttcttcttccataagacttaaattcactttatctacaagactaaaaaactcatacttaaaatcttgtggtatatccatatcaaatttctcattagcacgatttgcctttagcatagaatgagtatttataatttcacttgctttattataaagctcttttgcttgtttatcaaaataattttccatacattatccccttattaagctataagattcaaaatatgattttacaaaaccttcattttctatggcttttttatatacttcaatataactgtttctaatatccttcataatacctatcattaaatctacaggatacatttttaaaaattcaataaatctattaatatagtggtttgattcatatttatcattcttaatatttaattctaagtcttttagaatgttcatagctgatagataaagtcttgtatgactctcattttttactctttctacaatgggctcatcaatagattctcttaaaaaaacatcttcataggatattaatggttcagagtttgattcaataaaacttataaattcttctgcaataactttacctacattaccctttacaacatttaaaaatactgctctaggaatagaattatttttttctttataaactttataaattttagatactctctcataacttctaggagtagctcttacatcatcttcatttattttatgcagatattctggaaaagtggaaataaactcgataacttttctttcaataccctcatctattgcccattttatccattgtgtatggtcactctccatatttaaccaaacaaacctattttcttgggctgcatccatatctaccacttgataatcaaaatctgaaccatatttacttgatggattcattgctgctaaaatctttacatcatcatgcagtttatatccattaatttctctatttaaaattaaattcataagttcttgctgtactgtatgctcacaacgatttatctcatctataaataaaagaactgtcttacttttagatatctcttcatcaatttctcttaatttgttatgaacagcatacactgttgttttcttttcagtcttatatccattagaattaactcctacataagattctatagttggaagaccacctatttcaccctctttaagtaagtttccatcaataacaattaaactccaatcattttctttggcaagcttatttgctaaagctgtttttcctattccactttcacctactattaaaggtacttctccagtggataatattaagtcaacgctttttaatgtgtctataaaattcatttttctctctcctacataatctttaatttctcatctacagctattttttttgctgtcttacttccatatttataaataaacataattttatctattggtatactttcgctatttctatctataacactacaattcaaaaaatctctaatatacttttcctcaacatcttctttggataatacttcttttaatacactctctaattcatctttagatacttttttcagaatgtacttaatcactaaaatattcacttttaaaaattccaacattttatttttatctaaatcagttataaagctaatagctgcttcattattttttatagctataagttctgcattataactaggtgaatctatatatctcaaggcatcataacttattcttactgcctcctcttgtacactttcataaggttgttttataaactttatcgaatcataattttttcttactgctaacagttgtaattcttcacttggatttttagcatatttaattgcccatcctgcttgatttatagccatttcaataactttatcagttgggtttttgatataatccagtatactccatccctcatttactgcttttatcatcatatcttctgttggattatctataaatttaattgctctaatattattatctattgctagttcttgcatctctctggttggattatttatatattctagtacaagcccattttctttaatagctaacaatttcatttcatcagttggattatctattgtagctataatattgggattattttttatcatttcaataactctcaatttttccataatgtgcctttctttctataattatttttatatctatattaattataataatctattcctatttatataattgtttcttattataattaatatactttttaatcaaatttaaacagaataattataccaatatataaaaaaatttctaaaaaacaataaaattaagttataaacaccaatatatttctattatttcaataagtatacaattagattagaatctaacgctagtaataaaaaattactttcccaaaatagatataagcctcattttatcgttcaaataatgaaaatatatttgatttcatgcaaaaagagtgcctaatgaactaaaaagttcattttgagacactcatttctttatataaatttatatagtttttaatcgttcgcattcaaccactcagttaagacttttatatatttctcattttcttcaacgaatggcatatgtcttgaatactcaaataactcccacttactattaggtattctatcatacatagtctttgcaatatatggcgaacataaatctattgctccactagttactagacaaggctcttttatttcatgtaatctatctgtaaattcatatccagaaagagttcctgtaggagaaaattcattttgtccccatcctacaatatatgcttcagaacctgattttttaggtcttctcaggcactctggagaatcttctgtcacttcacctgcacaatacatttccataaatctttctaatgcatcattatattctttattagagtaatctccagtatttactgcatcaagcaatgctttttggtcaacctcactcatatatgatattcttcttttttgttctttctcccaaagttttgcagaagaaagagtagatgaaaggatgtaagacttaataccttttggtttatattcaatagcataccaaatagcctgcatacctccccaagattgacctaacagatgaatttcatcaagtcctagatgttttcttagttcaataagctcctctatccaagtatctgcattaaataactcaggatgcccttctacaaaggaatttccacaaccaatttggtcatacattattacttgtctaccactttcagctatcttatccaatacctcaaaatagttgtgtgtagaacctggacctccatgaagtaatactaatggcttcttcccttccgtattttctcctactatacggtaatacgttttaaaacctttaaaaggcatatatccttcagtaattttcatatttatctcctccaatttgtaattataaacaataatcaagttcattaacaatactatttaaaacctctcatacgtatttaattatgtcttttaatctttatacctacttttataaatagtataacataaaagttaaaaatctctatactaaaccaattataaaattatattaactatataattttattttttaataatagtatatacatatttgattattttcatttgctatttaaaatcaattttaagttttcttcttataataaacttcctctttgtggtctcatgttagtctctaaatttaaaattttacaaaaaattttcataaaataaaattatattgattgtatctaaacaaatagggcaataaaataattaagtatagttacttacctttcaagcaatattagttttatgttagaattttattatattgatttacaggaggtttgcatttgaataatattaattcacttaaagtaataaaattatctcttggatgttctcttgctatattcattgcttggctattaaaattagaatattcaatggttgctggagttatagtactacttacagtaaaggacactaaaagagaaactcttaaaggctccattggaaagatttatggttttcttttatgtactattttttcatatttatgttttaatattttaggatataatttgacttcattttcaatatttatatttataattataccactttgttttttgttaaatattcaagatgttattgctatgtgtgtagtcatagcatcccattactaccttcaaggagaaacttctatcaaatggattttaaatgaagctggaatatttgcagtaggaactggaataggtgtcttaataaatatgtatattccaacaaatatacataaaatccatgaagttcaaaaaaagttacaggaagaagtgagtattgtacttatagacattgcagatattattgtaaatcctaaaaaagaaaatggatatagtagagatttatataaattaaattcacttattgacagcagtatttctgaaacttacgataatattaataatactttattaagtgatactagattcttcttagaacatatggatattataaaaagccaacgggatatcttagaaaatttgtatagttatgtatctcaactaaattctacaccaccacaagctcacattctatctgctttcatacataaaataggttatactgaatttgaagctgaaacaggcaatcttcttcttgaagaattgaagagattaatgcttagtatgaaaaaccatcctctacctgttgacagaacagagtttgaaaacagagctattttattcctatgcttgactgagttaaaacaatttttagttaatcgtaaacatgctcagatgcttagagataataatttttataaataaaaaggtgagaaatccagcagttgacctgactacaaaatatcagatataatattaaatgcgcccctagtaagagggcgcgatgtttataacttattctactgtcatgattaaatcattattcatatcgaatatacattatttgaccaagtccaatattagctttttcatcagtgatttctattttaatagtcacatcattttttttacagtactttgctaattctgcaccagaacgatttttaccactaaaatctaaagaaaatggcttatcatatttaaaaggatattcaacaggttcaccttctggtgctaatgcaaacatcccatatggtgtgttcataaatcctattacagcaattgtaagatttgatgggtctaaatttgatttactacctagaaatgtaactgtattcactgatgaattaattacaacacatctaacaccttcatacattacatgtttatcctttatatctccaaattttccaacaacctttgccccgtcttgatgtggtaacatagtgtgcttcccaggtagtgctggtttttgcgtttgtgctactgctccaactgttggatatgctgtcttatcaaatggtaatgggtggctaagactcttgtatatgatatcctttcctgctgatttattagcatcaatatctacatgatacaaacgcccatcaccaaaacgtataagattccactggtggtcatttgatgtgctgtgtacataataagattcaattcccatagcgtcacacaaagctttcatgctcctagccattcctgaacatgcaccttttttagtaaccaatgtataggcagtattcgctccttctactgcattccagtcaacatatgttgtgttatttttaatgtgattataggcaactaaaatcttagcgtctgtagtcatgttctttgtaattttattgttcataaaatctgctgttgcttgtgctactgagtttagttgggcttgtgacagctttggaccatatacgctattggttccagtgacatagctttttggtgtttttgctgttacctctttggctgtcataccataaactgtcatactcatacctgagactaaaacaattgttgtaatcaataacttggtagctaacttcctaattttcttcatacttagtattctcctttataaaatattgttacttcctattctctaccattaataaagttcatttgggatttaaaaaggtggattgtcaatatgtatgtttcttcatttatacgttcgtgaaatatttaaatttcatggaaaatctaatagatattttctagataatttgtatacaatacaactcgcaaatcagggtgtttgctgttagtttgagaaaatgatgatgattaatatattcggaatctttgacctataataaataccattgtcttcaatcattaataatggtaagagtaaagagaattatcaataatacagttaaaatcaactttgtatacatttcatacattctctcccaacaacattatacttcttataatttgtatattcaatacgttttctgggaaaatataggatatatctataaaaatataaaaaaggagttgaacttaaaatttgattaaaaaaaatcaattttaagacaactcatttgtattataaaaatgctatatattattattaagtaagtcaatattttagatatttatctatttcttattgacttacgcttatagtctaacttatttgtttagttgatatataacctagttttaagcattattaatatttaaataatcaagtatcctttttgtttcttgtagtttctgttctgcctcatttaagttttcttgaattatagaaatatatattatatctatcaacgtaagcattgctattcttgaagaaatagctccttctctaagccttttttctatatttggtactactagctttaaatcactaatcttactaagatgattgtcactatatttagttatacaaatgaccttacatccttttaattttgcattttctatagactttattacttcttttgattctccagagtaagatattgctatagctatatcttctttatctacatttgaagataccataagttgtgtatgactatctaaagaggtaaatgcctgtttatttatccttaaaagtttcatctgtaaatctagtgcaactaaagccgaaccacctactccaaatatatatacatttttagcctttattatctgttcaactgcttcttttattatatctttttcattcaacaaccttgtttggttgatagtctctatgtttttgtttgtaattttgtttataacactatctatattacaatcatagttttcatctacatatgtgtattcattttctttgcccatcaaatctttagctatctcaatttttaaatccccaaaacccgaatatcccatttttctagaaaacctaactatacttgctgtacttgtttttgagtttgacgccaattctgatacagaaagcttacttatagcctctgtattattaagtatgtaatcagctatttttttatctacttccgttaaatcttcaaatatctgttttaattttaaaatgcaactcatactctaccacctctacctatttactataatatttcttcttagcaagtaaacatgctcctaaatctggagtcaacactggtctcactataccaaatctcgttttattcaaatattttttaagtggctctaatattaaatctcctgacttaaacactccacctgaataagatacctttatctttgtaccttgttcaaaatgatgctctaatcctattataagcctacttaattcataagctgcatcatcaaatattttactagcagtattatcaccttcaataactgcttttaaacatatcgtagcaaactttgctatttctattctatctccttgtattccatcatttacatattttattatgtcataatcattctctatattaagatgtctttttattaaatcatataattttgtctttgaacaccttccatcagactgcattgtgaacatttttaaggtagccattcctatataatacgctgaaccttcatctcctaatacatagccccatcctccacatctgtgaagattcccatctttatctaaagcctgtgctattgaaccagtacctgcaattatatttatacctttttccccatttaaagaacctgctaatgctatttctacatcattacctagagtataatttatatgactatatgcattttttgttgctacttctaatgcatacaatacttcttttatttttccatatccagcaagtccaacaaatgcatacgttatttcttctacatttatcttagcatctttacaaacttcttccaacccagttattaataatttcgttagattatcaaatcctatttgattataatgacaagttcctttggttatggttcctactatatttaattcttcatctactaatgtaaatgttgttttcgttcctccaccatctacacctaaaaaatacatactatcctcctacaatatctttaataattctttcaatacttaatatctaaaaataaccttccaatgctgtttttttaatattgaaaggttatcagtactattatttattttacaatttttctattgattttaaagcttcacttatataaccttcttgtctatctaggatactctttgcactatccttatctaaaccactttttatcataaatatagccaatttaactctattatctgcttcttctaagaatttttctgcaacgtcatattttacatttgtagctatcattattattctttttgctctttcaaccaacttttcatttgatgtcttaacatctaccatcaagtttgagtatacttttcccatcttaaccatagaagctgttgttaacatattacataccattttttgagctgtaccacttttcattctagttgaacccattattacttctgcccctactataatgtttattggtaaatccgcttttttactcatttcactattcggattcatagttattgatagtactgcacaccccaattccttagcatactccattgcacctataacataaggagtccttcctgatgcagctataccacatataacatccttagatgtaactcctctatctattatatcttgctttccaagttctttatcatcttcagcaccttctattgctttaaatattgcttgatttccaccagctattatagcttgaacaagctcaaaatccactccgtaagttggaggacattctgtggcatctagtattcctatcctcccactggtacctgctcctatatagaataatctacctccctgcttcattctatctactattatattaacagcttttgctatactctccttttgttcttcaacagcataggctacagttttatcttcgttatttattaattctattatgcctaatgtatcttctttatctatttgcaatgtattcttatttctaccttctgtaactaaattttctaaagtttttattaacatatcatttcctcattttcttaatattaaatttttaaacacattttaactccaactttcataattatatttttataataaattaatattttcataataaattattttgttgagggtttaaaatcaaacttttgccatggtttaatataatctaatataaataattcttcttttcttatatatcctactacattcgatttaccactgtttttcatatcagtcaaggctatttgtaactcccctgcataatgaccatattcactactttcaattactatatctcctctttttattattttaggagtattaaatagttcaaatttgtatcctttatatttaacacgagattgagtagaccttatcagactgtcagatatatcccctctattaaaatgtatttcttcaaagagtatcttcttctcaacttctcgtatattttcctctattgctacatcaaatgtaaccatatcttttctcatagaacctaatacctttagctcctcatatgttggataacaatttgatattattatatcatttatattattcatagctattatatgctttacttgaatatctataggtagatttctgtgcatctcaattgttggaagcccatcagttacaggccatggtccaaatgtggtttcattttgacttgttacaaaaactgctgttcttaatccatacttattaaatctttctgtacattttataaagtgttctaaatttaatccactatatctatgtggataaaagttatgacatcctgtcaaattttctttatttggttggtagtccattattgtatctatataattagtattattactcatattgatttctattttaagattttgaggattaaaagtcattaaggccttttcagaacctgtaaatcccatatcaagccttattccgtctgccttcgtctttttaaaaaaagtcaaatctttgtagcttatttctaattcaccaaatactctgggatttacatcaagtattacctcaaaacctttaaacttagcgtattcatttatacttttaaattttttaattatattttctttagtatctttaactgataataaacatgaaaatatacgtgtaaatccattttcagcagctttatctatataatcatatatttccttagatgttgttttttctggataaattgatattcctaatcttcccatctgtgtcatctccttatatcctatatgtgtttaaatttatttcgaattacacgaaacttttttaaaaatttggtgaaaaaaagtttcatatatatttataaaaaaagaaaagtttaccttttctttttttataaacaatcaacaaaatatcttcgttacttatttcataactgttatactttgaaatttatactaatctaatatagtttttaatttccaatatagtttctaattaataagcttcttgctcttcaactttttcttcatgaagcaatctcttatcgtacatcttgacaaatggatagtaaattattattgatatagctatacataataagttaagaactgaagctctccaatctccaccagtggctaaatatgcccctactggtcctggtaatgtccaaggagcagtaactactactctggatactaaattagcactcatagcaaaccatgaaactgttgccattactattggtgccacaacaaatggtattattaatattgggtttaatactattggtgctccaaatattattggttcatttatattgaatattgctggtattacagttgcttttcctaaagactttccataagctgattttgctctaaatgcaagaagtaaagctaagcctattgtagctccagaacctccaatccatataaaccattgaaaaaagggttcagcagcaatacctggaactgcttgacccgcagcatatgaagctgtattagcatctaataattgtatccataaaggtcttgccaatgaacctattattgatacaccatgtattccaaatgaccaaaaaaacgttattaaaaatattagtataattactgatggtaatgtgtcagtggctgaaactaatggagttactaatttagctatgaagccatgccaatcaaaccctaggaaataagtaacaatagccattaaaattattattaatgcggctggtgtcagagcttcaaaagaccttgtgactgatgctggaactgcttctggcatggttatcttgaatttagatttgtcagtaaatctataaatctcaacacctattatagatgttacaatagcaacaaacattgaacctccaccaagattagccattggcatttgccatccttgaggaattgaattataccaagctaaaagttctggactcttttcaactatctttaataaatcaggggtaagaccctctattgcagtaggaactattgtcaaaaggaatgtagctgtagctaataaacctcctgtcaatccatctaacttatatgactttgccaaactataacctatgccaaatgtagaatatactgatataataaaaaatgtcattctatatggtagtaatattgtaactgcattttcctttagatactgagttaccccccatgaatctggtaatggaggaaatgctaatatcaagaaaaatgacccaactattataagtggtaatgaagctacgattccatctcttacagctcttaagtgacgttgttctgccaatctggccatagaagttgataatttactgtctaaaaattctgtaaatttatctagcatcttttctctccttaattaatatttatttttattatcattaaaatttttataaaattaactttcttctaacctaacaacactgcaactactatttactcaacaactcttgaacttgttttaataactttggtcctcctaatggactataagcttgtgcttgtattaatgcacatggtacactagcctcatcagcaaaagcttttaaatagtcaaatctatgtctgacttgtggagctaccatagcaatatcccatccatttttaacttcattctcaaactcttgagtaccaacagccaaaacatctatatctattccattttttgctccttctttttgtaatgcattaactgctatagcacttgacatccctgatgaacaaacaaataatactctcatattgattccccctgtttttttatttcttttcaatcattatagcatgtatttttgattacaggaatacgtttgtatatattttttcatattttacatttttaattgtaattttatttcatgcatttatatcttgctttaattgctttatttatctaatcattcttttgtctaaaattacacactacttaaaatactcatatcttttcttaaaaaagaaaaaagactatcttttattaacataaaatagtctcaatacttttttaaatatgtattcctttatatatccagaagtaacctattattgcaaatgataaaacaaataaaatatacagtctaaaaaatcccaaagaaaaacctctcttagtttcaacaaagtatcttgtatatgcaactgcaaaagatgtaattaatgaatttcctataacaactccaaatctattatctattccaaatatagataataacaaaggaaaaactacagtacttactagagatgaaactattagtattaatccacttttaaaacttatagttggaatattataatctgttctttgatttttctccatttctttcttagtatttttattactttttgcatttttataattattatttttctttcttttcttttttttattattagacatgtcatttacctccaaaaggtttaggtgttatattccctaaaataactttatttttagcccctgttgcagatattacattagaaaaagaattatttaatgtttcattgcccaagattacaaatgccaaagcctcctttgcatcagaagaatacccatattcatcttgagttaatacttcaacctctaataataactcttttatatatcctattaaagttagattatgaactcctccacctccaattaataaagtatctacattaacctttggaagtatgaagtttttataattataatatatagcttttgccgtaaacatagttactgttgctatcaaatcatatttatctacatgtttatatttgttaagcatgttatccaaatagacttgtccaaatacctctcttccagtgcttttaggtggcgcttgactaagatacttatgactcatcaaatcttttaacatttcttcattaattttaccttttgatgcaaagtatccatttttatcatactttctattaaataatctttgacatactccatctattatcatatttcctggtcctgtatcaaatgcaaatacatcatctatgttacatgatttaggtattatagtaatatttcctattccaccaatattttgaagtgctaaatttttatttttatcactatataataaaaattcactatatggtactaatggagcaccttctccacctgctgctatatccattactctaaaattagatattacctttgtatttgtttcatatgctataattgctggttcacctatttgaagcgttgaagatacaaaattattataacttcttggtatatgaaagattgtttgaccatgagatgcgataaaatccaaatttgctatatgaaagtttgctttatgacacactgattttacagctttactaaataaatatccaagcttaaaatttaagctacagattaaatcaacactcgattcctcttctatacagcactttcttatttcgtcttttatatctttaggaatttctagagttataaattctatttgcttaactttagtatttctaccattcccactaatttcagctagtactgcatcaactccatctaaggaagttcctgacattaaacctacactatacatagttatcatccttttaagtttatagttattcctccccaaatcaaggtattaagtttaataattttagaattaatcttatttcatctttaattgcgataatttactcttacgaaattaatcgagttaatcttatacacgttttttaccttagctaaatcttacattaatttattttcagtgtcaatgtaatgcatgtaattttttttcacaaacaaaacatattctctctccaaaaaccatattaaaatagttactacaaataaaaaacataccaggtacctatctgatatgtttttcatatataataattattattttataatatagatagaacatcatttaaggcactaattaaatcttcactattttcaagaactaaatttattcttattgtatatgtcgatttgtatatgatgatagattttatagtctaataacctaactatctaggcttaaataatccgatatatcataaaagtagatattaaaaattgtatatgaaccaattttcgaacatacctcaatctcatgccctaaactatctatcattttctttacaaaatacatccccattccagtagacttatacaattgatttcttccatttttccccgtaaatcccttgtcaaaaaccctagatatatcttcctcatttatacctataccaaaatcttttatagataataccactccattttctaacttttttgaattaaattcaatcttaccaacttcctttgaatactttatagcattattaataatttggtctaaaacatatgacatgcatttagaatctgtgtaaacatcattttctaattcattcaaactaacttctacattattttttataagcaaaaatgaattattttttatagacatttttaccaatttttctaaattaaatttatttataaatacatcttcaaacatagtgttgcttctactactatacaaaatagagtttactaaaaaatttatctttgcaacctgattcttaatatccaaactatcttctatgctacttaacctatctgtaattatacttaaagaagatattggaatttttatttcatgaacccatttagctatgtaatcatctaattcttttaatgattgtttataagtctctatgtcactattattttttatttttaagttttctataatatcttttattagattttcttcaaaagattgtccatcaattaaataactgtctatttcaccactattttctatacaattatataaatttatataactatttctaaaatttatataatctataacaaaaaataccattattataaacagcactaaaaaatctaagtatattaattctgaatatctattttttaaaatatctatagcaaataaatagatatttattatactaactacaactaaaggtagagcaatatacttagacctaccttttaaatattttactagcattatattatatatcctatccccttcttagtttttataaaatcatcaaaacctagttctttaactttacttctcaatctattcatatttacagtaagtgcattgtctgtcacaaactcatcattatcccatagagtcatcataagactttcccttgatacaaccctattcttattttttaataataatgttaaaatttttatttcgtttttagtcaactctatacttttatccttatacttatgttttataatccctttccccacatcaaacatcaaatcttcacaatacaaaatactattagaatcactataattatagactcttcttattataccatttattttggtaaccaatatgtctatagaaaatggtttggtaatataatcatctgctccattatttatacccattattaaatccatatcagaatctcttgatgataaaaatattaatggtacatttgaaatagctcttattttttcgcaccagtaaaatccattatataatggtaaatttacatctaaaagtactacatctggttttttatccataaattcatctaatactacctcaaaatcatcaattaattctactttaaatccccatttttcaagtgctaacgcaatctcttttgataaatcaatatcgtcctctactaataaaattctatacatttgtatattctccattatcctaatatttcactatgccatgaattattaatatcataacatattttatataaatttattacccaaattatttagttaatcaacaaggagactcttattacaagaatctcctttctctttattaatatatcaactaatttttatacactacactcttaaacttattaacagatactgctccatatattacgaatattatcaaacatatcactaaacttagtatatatataccagataaatcgttcatcaataaatctcctgctaatctcaatgcaaaataactagatatagttgcacttaacattggcaaagtataaaatatagctacttctttaagtatagctctatttatatctttttctgtagtacctatttttaataaaatcttgtatttctctttatcttcatatgcatcactatatattttcatatatattatacttccagctacaattgcaaagactaagaataaaaacacaagcactacatatgcaaacttcatccattgactctcaccttgagctttatatccattctgaatatatccattttttaaacttaaattcttttcaatattgttgaacattacttggctattttcttcttgaaatacctttgcaccataaaaatatacttgttgacccttatctcttagtttaaaatatgtatcatcatttaccactataatactttgattaagtcctgtccctaatactggaacttttacttctccccttgaaatattatataactgaccatcaagttttgtcttgacttcttttgtagctattgatgctatcgtttgaggactttttagctctattacattatttccactaactaatctttcaccatactcttttaattctttatcattgccattcactttaagagtattacaaaaatcactatatttcattatagtatctgttgtatcataagcttcttttatatctgttttctttaagattgttagttctggatttacggagtactttatcttattagtatcttttattatgttctctatttgttttttattcacttcatctttatccattgaaactatgctaatagtgtacacatttctttgttcttgggcattcttatgtatatgcttcatagcaactgaagcaccaagagttgatattgttgtagttataattatagctattatagcataagttttatagtttttatttaatcggtagtttatattgtttatcgcaattatattatttccattaaataatatttttttatttttgattataatatcaaatataacaggcataactgatttgaataagccataagtacctactattattatacctataacaggtagtacactagttatatctccagttcttatattcgtagaaagatagtatccatatcctattactataagtgatactatagctaatatatatatacctattcctacctttggtattttttcttgttttttagatatattgattagatttattacactacttctacatattgttataaaaccttttacagccattattataaatatagaaataaagattaaagtagcatatagtatagcttctatgctaagtccattagatacctttatattaaatccagataattttattatcactacttgaaaaaatctagatgttattatccctataattattcctgttatacaagaacttattcctataagcatattttctacaaaatatatttttcctatagtatataaatctaatcccataaaggacaatattccaatttctttagacctattcttaaaaaatatatttgttgcataccatataaagaaaaataaaaatactgatagtatcattattacagctactaacactgatagtgtaaattttttattttcctcttgtaacacatttatagcatctccatatcttaataattcaaaattagtcagcacaactactgaaaaaaccatagatataaaaaatgctagataagttcttatgttactcttaaaattattataagcaattccaagtatactcacttacatctcacctcccatagaggctagcatatccataatttttccataaaattcttttctactatttcctttgtttaatttacactttatatttccatcatttatcatatatacttcatttgaataacttgccgttagagggtcatgtgtaatcattataatagtagcgttgttttctctgtttattttttctaatgattctaaaagttcatatgctgatttagagtccaaagcacctgttggttcatcagcaaatatgactgctggatttgtaattaatgacctagctgctgcgcctctttgtttttgtcctcctgataactgatatggatatttatctaaatgattttctaatccaaattttttagctatagaaaataccttagcttctatctccttgcttttcttttttcctaatgctagaggaagtgctatattgtccattagtttcatattgtctaatagattatagtcttgaaatataaaccctattttttctcttcttaattttgatagttcattattttttacttttgatatattaattccatctagtattatttctcctgaagtttgtttgtcaagtgtagacattaaatttagcaatgttgtctttcctgcaccagatggacccattattgctataaaatcaccttcattgactgtaagagatatattttttaacacatttgttttaaatccttttattccataatcttttgatatattttttatttttaatatttctttcataataatagcctccagttgctaattttttaatatatatttattttaaaggttttatataaataaatccttaagtaaatattacattttaactgttagcattacacttttgtaacatatggaagactattataattatagtggaaatatcttaaaataaaagcatgattcacttttttgtataaacaaagaaaagaagcccctaagaagcctctaatctatacaataattcttctctataaaaaaccaaaaatacaaccttgattgtggcaaatacaggtactataaacaagtgatattactactatatattaaaacaattattcttgaagataattcaataagactatcaagccataagctaagcatccaaaaagacttaatatcattaatgtataattatacccaatattaatactcaaaaaaccagcaacagttggaataatcagagatgaacctcccataaatatacttaaagctattaattggctactacttctaagttttttaggagaaacttcaaatattaatctttttgaagtaattaaaattaaaggagtagaaaacacttgaaaaacacacagtataataatgatatttgaatcatttgttaaagcaaataatagaaactgaactgttatcataatagcacttaattttaataagtttaaactgctatatttttttaataaataagaaccagccagatatgttggtatctctaataatgactgtaaagaccactttaaagatatctgagaatttgtagcatttaaagctatcattttatctattacagtacagttatttgctaccaccattgagtataataagaataaaatacatactagtaagatatattttttatcttttaataattcaataatatctttattagttacatttattttcttattaatcttttcaatatcaggtaataatagtatatttataataagtaatactacaattaaaccaatcgctacagataatccaaaatatgagaatctaagaatcaagtaagatgctaccatacttccaatagcccatccaatcgacccaaaagtcttaataaatgacaaataattattaatattatctccacaacctattatccatgtatcatataaactacagcaagtatttaataatcctcctgataaagcaacaagtaataagtatattataaaagttgcagattcagtagaaaacataataactgatgcaattccataaactgataaactaattaaaacaatttttttcattgtttgatacttatcagctaatactccaaataataattgaaataatatattggttattgcatagctcgataatataattcctctttcaaacgctgagtaacctaattttgataagaaaggtgtgaattttgttgaagcaaaggcaaaaataatatatgagaaaaaatagaatatgataaatttaaatttaatcgctttattaatcataatcaatcaaaattgataactttaataccactatttccttcctgatttaagtttgaaagatgatattttaccgtattaggattctctacaataactaaaggaatatataaagtattttcaagtaacttattatcaatttctactaacttttcccccatattaacttcttgaccttgtttaacttctaatttaaagttttctttttttgttgttgcactatccaatccaatatgaataagaatttgaacatcattttgcaatttaattcctatagcatggttagtttgagcaataaaacttattactcctttagtcggtgatttaagaatattgtcctttgctatcatagcaaatccatctcccattaccttagttgaaaatactttatcaggaatttctccaagattaattatttttccatcaatgtatgaattaattgtacttgcttctttttttcttttaaagaacattatagacactcctctacataattaactttattctaattatcattacaaataacgatattaagcatactgcaattgaggaaaaaagagccttatagctctttccccattgtagttctttaatactgcttatgatttgtttaattccaacaaatttataaatataggtaaacatgataacaatagttattgtgtaaatttggaatatctgccctaataagactaaatagaaagcaatcatgttttcttttatctctttattcttttttatattgtaaataacatatgcactgtatactgcactaaagttagagattaaatttaaacttgcattaacatcattgtttaaaagttgtgaaaatgaaatgtttgtaaataatgatgtcaattctaaatacactatatataaaacaggtaatattagaaaacaaaccataaccactgaaagaaatatattttcatcttttaatactgctgttatattttttattttatttgttatcatgtttttgttctccttatttaaaagttggccagaaatccttattagccacaatcatttcatctaagatttcttttgctacttttgcacttggaacagttttactcatagtaaacgactgccataatttttgataacttttttctatccatgcttctacagctaatttttcagaagcaacttgttgttccattaaacctttttggaaagttggaattttacctatagacataggttcaaccatatcttttccaacaaggcaaggaatttcaatcattgcatcatctgcaaaattttcaatagctccattattaggaacaatcagtaaaaatctttcctgagtattaaatgctaatgcacaagctaattcaacaataaattgagaatgttcacttgcatcaaaccatgtatcccttgctgtgccattttttataattctttcacattcttcgaatgtatccttttctcttctatccataatttcatttgctcttgtataatttggattagcatgttcaacagtttcatcagccattaaataatattttaaataagtattaggtaatgtagtcggttctatttctaataagtcctttgctgctctcatagtttctaaccaactagattctttgtgttgaccttgaggtgtaaattcctcatatccttttttagcacaatattcctgtaatttaggcattaaatcatttccttctttgtccttaatacttgtccaccacccgaaatgattcaatccataatatctaacatcaaagtctttacgagaatttaaacctaaaattctagcaaatatttcctctaaacatactggcatatcacaaatattaataattcttgaatttggtcttaatacacgacatgcttctgcaactatagctgctggatttgaataattaagcatccaagcatttggagaatatttttccatataatcaatcatttcgattattggacctattgttcttaatccataggcaattccacctgccccacaagtttcttgaccaacaaccccatattttaatggaattttttcatcttgttcacgtaaagcatataaaccaacacgaatttgtgccattacaaaatcaatatcagtaaatgcttcttctggatttgttgtataactaaatttaatttctggatttttctctctaacaattattgcacatgcttcagcaacttttctttgtctctcatcattattatcatataatttaattgattcaataggaaatttagcaacactttcaattaacattgttacaattccagcagtataagtactacccccaccagcaattagtatcctctgtctttttctttccatctttccttctcctttataataaattttcaaattcttctcttacacttggtactgaaagcccaataataatctgaatagcttttccattatgcactaaaccatgtgcacctactaccttaaaatcttcttctttagaaataattgagtcatccttcaaggttaatctcaacctcgtagcacagtttgtaacatctacaacattttctgctccaccaactaattttatgtattcagatgcttgttgagaggctttactcaatttatttcctttttcatctttagtttctaagtattcatttttagtatatagttttgtttcttcattatcttcctctctaccaggagttttcatatcaaacttcttaattaagaaagtaaataaaaagaaccagataaatgaaaatataatccctacaacaacttgaacaacatataccttccagtgatacattccaagaggaagccaatttaatacaacccagttaataattcctccaccaaaatcaccaacaactcctaaggcaaacgaaatcgtttgcaagcatgcatctaaaaatgcatgtactaggaataaaagtggtgctacaaataaaaatgtaaattctaacggctcagtaattccagttaatactgcagtaagagtagcaggaatcattaaacctaatacttttttctttttttctggctttgcagttacatagaaagcaccaaatacacctaatgaaccaaacaccttcgataatccagataatgaaaatccgattggatacatttcctttagagtcttagctgaagtttgaaagtcctgaatatgagtagcccaatatactgatgtaccacctggaacaacaacactatcataacaaattggtgcatatacaaaatgatgtaatccagttggtattaaaatcttttgtaagaatgcataacaccaaactcctatatttccactatttataaaaaacgtttgcaaatgtctaataacattttgaatatgaggccaaataaaacaagttaataatgcaactggtatcataacaaagaaacaaattgcaactacaagtgatgagcctctaaataatccaataaaatctggtagttctttatcataaaatctattatgaatataaatgacaatacctgatattaacaaagcaccaaccataccagtatctaatgttttaataccagcaatgcttacaagtccacttccagcacttatttcagctgcgaaatcaactccaaagctttttccccaaaaacttaacatagaacctacaaaataattaaaagtcaaatacgttgctaaagcctccatacaagctcttgcttgttgcttttttgcaagtgctattggtaaagaaatagcaaataataatggtaattgattaaataccatccaagctccactagatattacaccccaaaattggtaccaaatattttctggtgtagcaagtgaacccataattgactgattttgaaatacaattgagaatccaaccattatcccggcaaaagcaaataatagtgttggtgtaaacattgcccctccaaaacgctgtattttcttcatcatataaattactcccctcctcatatttttagtttatctttggccttagatatctattattttaacaggttaataaatatatacaatctttagggtacatttggagcttattcacagtcaaataagtttttgcacatttttatgttcaaattctcataaaaaaaagaatgactacaatttgcaatcaatcccttctgtaatcattctatgccttttataaatactatatttaataaataataactcaatcaatataaaatataacattgtcaatttataactagggtgcatttgtaaaaatgagatattagtcgctgaaatataaattgattcatcacttaaatcagtcaatgtattatttttaaactctgtaattgaaattattttagttcctattaattttaatcttctagcaatattaagtgtattctcattctcaccacttagggatataataatcataacatcatttttactgacaatattgtaaaaagaatcatcaaatgttcttccctcaaaatcatatattatttcttgacatgataagaacattctctttatctgttttgcaaccacattttgaatatcacctgaaccataagcgtatattgttcttgattcataaagaagtttacacaatgcatcataatctttatttttttgatcttcaacatacttaattattgaattacatgcaatatcaaatgactgattttctatgacatgaaccttttctgattcccagcttaataatactttaaactcactgaaaccttttaaatctaattttttaacaaatcttgtaatagttgcacgagacacattacatttcatagcaagttcatttattgacatcttactacaatgttttttatttgcagttatatatttccatattaataaatctgtatcattcaatttattataatttaaaaaaatcatttcttctaatctcataaactattatcccctttaattaaaaatcgtcataaatattataccaatattcaacattaaattacagcgtattcttatatttactatttagcccataaaattgactataaaaaatactgctataattgatgtttaaaaaaatgtagttttaattttattcttttatctaataattaatattttcaagttctagtgcttttcttatgcaattatcatctttaaaatcagcagtccttttacaatcttttactttaaattctggaatagttttaaattcctcatcacatattccattcttatttaaatacatacaacttgccattctaactattagaccactattttttaaattaaacaatacagggtctatacaccctccatctccgccagtagtttcaccaactaaagtcgcaaatttagtttctttacaaaacattgcaaatgactctgatgatgaatatatttttctatcaacaagtaagtatatattacccttaaattttgaatcatctgtagattttatagtataggaagtatcttcaaaatcattaaaatcttttataatttctttaggtgcattttcctttacacttgctggtaaattttctacaggatttaattttatatttcttgcatttgtatatttttttactatttcattattatttctataaattctataaccatttattttgacatcattttttatgagtttagatacgattccctgccaatacctatcacttccacctaaattacctcttatatcaataattaaagctttatgtttttctaaagtgttaatataatctccaattatttttaaatcattatttatagagccattctttgatgacattgatggtaaatacatatatccaatctgacccttaataacatcctttaaaattaattctttttttacaaaaatatcatctggcatttttattttaagattcatagagtcatatctatccacaacttttttatcattaagaaaatcataccaatcattattagagtatgatttcttaaaaagttcatatcttttcttattatctattacttctgtgtgtttattatttaaatcagataatatagatgacagttcttctataaattcttcatcattttcagtgttttttattcgttttgtatattcatccttatttgctaaccaatcaatattattaagtctcttatttacacctagatatggatatcctgtctttacaacattatacacataattaaagtcatccaccttttcctcttcagacaactgattcttttgagaataagtagaattacctaataagattataaatgctaaaataattactaaaaataatactttctttttcatgtaattctcatccactttcagattttatattttaatacattgtatcattattttattatcacctaaacagttaaaagaaattcttgaagatatattccactattattctatttaaaaatttttatttgtattttcaaaattatttcatgaaagttataaaataacaattatattcaaatatctattttactgctatatcctgaaagtaaattcttatcagtgatatactaaaaaagatatgctaaaaaatttatccattataatgacttaaatttagatactttactgatttttatttattagttgagaaaggtattgataattaaaaatattgataactatagaaatgattattttttatagaaattttaaggatataaactaattatacttaagtctatatccttaatttatcatgattatgagaatttttacaaatacttatctttgtccgttttagaataaaaacaagaacatatcctgttattttattcaaacatccaagtttaattactacacaattacttattagaaattgtatctacttcatatatatatctgttaagtatagcttctagcatttcttgtcttccagacttattctttataactggcatttgcagtgcataagattctaactctttaaatccaaccttaccttctactatatccttacctataccttcactaaaacttgcatatctttctttagtaaagttttcaaatacctcatcttctaataatttatgagctattaataatccctttgcaaatgtatccattcctgcaatataagctaggaataagtcttctacctcaaaagatgctcttcttactttagagtcaaagttaaatcctcctggtgctattccaccttgctttaacacttcatacatagcaagtgttgcatcatatatatttgttggaaattggtctgtatcccaacctaataataggtctccttgatttgcatctatactacctaaaacattgtttattcttgctatatttaattcatgttggaaagtatgtcctgcaagtgttgcatggtttgcttctatattcattttgaagtatttatccagattatactttcttaaaaatcctaaaacagtagcagtatcaaaatcgtattgatgtttagtaggctcttttggcttaggctctattaagaattggccagtgaatcctatttccttagcataatctacagccatttgtaagaatcttgcaaagttatccatttcaagttctgtattagtgttaagtaaagtttcataaccttctcttccaccccagaatacaaaattttctcctcctaagtacttagttatttccatagcttttttaacctgagctgctgcatatgcatatacatctgcattacatgttgtagatgcaccatgaacaaatcttggatttccaaacatattggcagttccccataataactttatacctgtcttttccatattaacttttatatactcaactatttcatctaatatcttatttgtctcttctaaatctcttccttctggagctatatctctgtcatgaaaacagaaatactcaattcccatcttagacataaattcaaatcctgcatcaactttaatctttgctatctcaattgggtctgttacattattccaaggtctctctactgtgcctactccaaatgggtcattaccctctccacataaagtatgccaatagctcattgcaaatcttaagtgttctttcatagtcttattacctaccacttgttcaggattgtagtatctaaatgctaattcattgtcagattttactccttcaaattttatctgtcctattcctttaaatatttcactcatttcatgtcctcctaatattttacacatataatatatgtcgtatgttttcttaatttaaaactattttctatctttatttttctttttaagctaatttaattatttatttttgtattaactacttcatctaataacttaaagtcatctttcaaagatttgtatattcttttatacaatctatgatatatcttgtatgtatctacattttcacttattggttctaatttagttgaagtttttattatagcatcacaagctttttgtatattttcatatattccagctcctactaatgcaagaattgcaactccaagtgctggtccttcacttgaatttatagtatatacatcttgattaaacatatctgcttgcatctgtctccatactttactttttccacctccacctgaggctcttacttcattaacgtctatattaagattctctattatatccatacagtctttaagactatatgaaacaccttccattattgaccttgcgatttcttttttagaatggattggagataatccaaagaacacacctcttgcataagggtcaagatgaggagttctttctcccatcatatatggtaagtaaagcaatccattacatcctgttggtacttgacttacttgattatttataatctcatatacatcttcacctaaagaatttgaaacttccacttcactttgacagaaattatctttaaaccattttaatgacaatccagctccttgagtaactcccataacatgccatgtatttggtattgcatgacagaaagtatgaactctaccttctttatcaatttttggctctttcgtataagcaaatactacacctgatgtacctatagtagatgaaactactccatctttaactattccatttcctatagctcctgctgcttggtctccagctcctcctaccactattgttccttctttaagccctgtcaaacttgctacatctctagtcacataacctgtaatctcttgtgattcataaactttacctaaaagatttttatctatatttaacttttctagtacttcatcgctccaatctctttttcttatatcgagcaactgcataccacttgcatctgatacctctgtagcatattcacctgtcaatttgtatcttatataatcttttggaagaagtattttattagtatttatatatatatctggttcattgtttctaacccataatatctttgatgctgtaaatcctgtaagcgctggattagcagttatttcaatcagtctttcttcacctactaaatcagttatctcctcacactcttttactgttcgttggtcacaccatattatagagtttctcaatgttttaccttcattgtccagcataactagaccatgcatctgccctgataatccaattccttttatacattcactgcttatatttgaactttgaactacttctcttatagattcgactacagctttccaccaatcatttgcatcctgctctgcccaacctgatttctcttgtataagaggatattcatatgtacaactttttataatatttcctagtttatcaaataaaactgttttagtacctgatgtaccaatatccacacctaatacatactccaacttcatccctccttgaatgccacttcataactatcgttttcctatcctaatttttttatattttaggtatattttacttgctttatttttgttagtatattaaactaacttatgaactaataataaaatatttaattatctttgtcaatgcaaaataaccttttatttttgtgtaaaaagtattacaatattattttaaggaggaatatcaaattggttactgataaatacactattcgagaaatgaatgaaagattggtacttgaacaaattataaaaaatggtcctatttctagggcaagtatagcttctactataggattgaataaagcaactatatccgctattaccaaaaaacttattgatgaatctctagttcatgaaataggaattggaaatagtactcatagtggcggaagaaaacccatattattagtatttaataaatgtgcagggatttctttaagtatggacattggatacgactatatattttcttctctatcttacttagatggaactattataaattctaagaaattaacagatatacaagtaagtaaagacaatgttatacaattgatagatgaaattataaatagttataacatatccaaaatagacactccttataaggtaattggtcttactttggctatacatgggattacttgtgaaaataaagtattgtttactccatattataatcttaatgagattgacttatatagcatccttagcaaaaagtatgactttcctattcatatagaaaatgaagcaaacttaacagctttagctgagaatactttttcaactgtacataactcactacttagtctcagtattcacagtggatttggttcaggcattataataaataataaattatatagcggcagaaatggtatgagtggagaaattggtcacactatcatcatgcctaatggtaaactatgtccttgtggaaatcgtggctgtttagaacagtattgttcagaaaaaaaggtatttgaacagctttcttctttagaaaatattcctaaaatagattctgatatagtaaagcaactatattatgaagataaccagaatgccaaaaaagttattcatgagttttgtagttacttaacaatagctataaataatgctattacaacttatgctcctgaaataatatatttaaatagccaaataattagtgatatccctgagatattacagattacaaaagatatgttagttagctcttttaacaaaggaataaatatagaaatttcatcattagggtctgaggcatctctatatggtggctctgccgtaaatatcaagagctttttgaatatacaaaatttaactttaattaatgaaatataagggttatgactatatacagccataaccctttaaattatacattctaaaattagatttattatatagtttatgcaagattagctatattttttaaaaattgtatatcaattaagtattaacacaagtattttgttttaaatattaatataatcttcctactcatcatcagataataaacttgcattttgttcaaccatagaaatattatctttacctattttctctaattttgctgccaattcctttgtatctaaaaaagctgattcaataaccatacctaaatttagccctgaaataattttaattcgactgtcatcattggctactaataaagcagcattgcatggagttccacctagtaaatctgccattataattatttctgaactttccttgtacacttctaaagctttttttaatttttctattgttccttctattccatcatcttgtttcatatttacagtaggataatctatagaatcccctattatcatttttgcagaatttaagacttcttcagccatattgccatgactcatcaaaataatactattcactttaatacacctctttaaatctataagatgtctacaagataagttttcttatcatcaggcgtcattatagttgtaatttcaattccttcatctaaaagtcttttaaatgcttctttctcttcttcagtaacactgatattaggtcttagaactgttgtatcttttctacttgacatatttcctacatttatattatgtattttaaatcctgcctctacaaatggaataaggtccacaggagacttaacaattaataatacattttgtccttcatactttcctgcagtaatattttttatagcagtctcttctgtaattatagatgacgctatacctgcaggtgtagccattcttaaaacttgtttttgaacagaattgttagctactgcatcatttactaccattaatcttgtaacacccaatttattactccacatagttgcaacttgaccatggattaaacggtcatctatacgaatatttttaatacctttcatttccatatctaatatcatcctttccttattttaaaatacctaatgcatataaaattattgaaacaaccattactcctaaaattaagtatataggttttatattctttttaagagcccaataaacaatcacaactaaaattgcaggaactaacccaggcataatttggtctaatatttcttgacctttcattgtaaaatcaccttgttgaaagttcaaagcaacattagcttttacaactgaaggtattaatgcacctacaaccattaaacctaaaatagatgtactctcagttaaaatctttaaacttttttcaattgaagatattagcttagtacctgatgtatagccagcattaaatagtggtatacttaataatttcaatgctacactcactacaatccacagtaagattccaaatggacttccatctatcgccatattagctgctatagctccaaaaattgtccacggaataacgacaaataaactatctcctaaacctgctactggtcccatcaagcctgttttaattgaagcaacagcctcttcagtctcttcacttgataactcctccattgctacattaatacccaaaatataaggggcaacccaaggattagtgttaaaaaattgtaaatgatttaatacagcactttgtaacttttctggattatctttgtatactacttttaaaaaaggtagtactgcataacagtatgccaaggcctgcatcttctcataatttgaagaaacagaactagtaaaaaaccagcgccataagacactttttttcaccttttcatttgatttatttaatgataccttatcactcatcttcgtccatacctcctactacagtatattgttgttcttgattttccaaattctttttgtaaattataagtgcaattgctccaccaattaaagctacacctaataatggtactttcatatatactgctaaaacaaaaccaattactaagtaactaaaatactccttagcaggaagatatctaagtaataatcctatccctactgctggaagtagtcctccagctactgttaaaccacctgttaaccattcaggtgtatatttcaaaatggtattaattaaagaaggtccaaatattacagatagagcaactggaatacctgttgtagctgctgttaatagtactcctaacatttgcatataggttatatttttataatttccttttttagctccatcttctgctttatgaactagccatataccaatagtatttctaagaacatctaattgtaccatcaataaagcaactggaatacctatagagattcctacagatgcttcttgcttagtcgtaatagttataaatgtggctactatacttgctgtttgataatcaggtattgatgctccaccaaagttactaatacctaatgataatagctgtaatgtacctccaatatataaccctgtatttatatctcctaagataagaccagtaataaaacctgctgttactggttgatatgttccaaacattgttgaatttttttcatagtttataaaaaatccatatagtacgattaataataattgccataattgtggctccattatgatttcacctctcccaaaatattttttagttctttaaaattataactggaatcttgctttaggaaaataggaatttcttccagcgggcattcaacttcataagttttcccaccttcataactaactccactaaatatattttcccatgtatgtccttttggtaaatatacttttctacttctatctttataattcattattggagctaccaaaatttcatctccaagcatatatgtattatccacctcccaagttttatcatcttcaggaaattcataaaataaagttctcataactggtgttccatcttcatgcgcttctttcatcagtttttttaaataagtttttaagctctctctaatttttatgaattttgtaagaattacttcaacttcttcaccataagaccatatttcattaggagctccagttaccattgagcctccacctttatttgataatggtttactatgaggcaatctatctccatgcattctcaaaattggtgaaaaagtagcatattggaaccatcttaccataagttctctaaattctgggtctttaggatttcctccatggaaacctccaatatcagtagtccaccatggtatacctgccagtcccatatttaaccctgtatttacttgattattaaaagcctcaaaactagaatcaatgtcaccagaccatactaaagctccatacttttgagctcctgcccaagctcctcttacaagagttacaacagactctatgtcattatgtaaaccatcataaatcatttttaaataatcaataggataaatattaccacaacttaaaacatttccttttttatatctatagttatcaaaatcatacacagaatagccaggttcagctacatctaaccaataatagtcaatcccaagttgtttataatttttatctattctatcccaaacatattctcttgcattttcatttgtcatatctacaaagactgtatttccttgaatttgcattgtcattctaacaccacgattaacattgactaaatagccattttctaaataatcattgtagttttctgcatcactttgaactgtaggccatacagatactattggttctactgaatactcttctttcaattttttaactaattctttaggatttttccaataatctaagtcaaatttatattcaccttgcttaggccaatgaaaatagtcaattgcaattgatgaaagcttaattcctcttttagaatattccttcacaacatctaaaacttcttctgaagttctatatcttagtttactttgccatagtcctaaaaggttttcaggcatcataggaacagttccagtaacttgagaataatttttatttaactcttttgggctttctccacaagtaatccaataatctataaaatttgtagaaaacatcttccattctgtcatatttttagcaaaagatacttttccaattcccggattattccataaaagtccataacctagactagaaatataaaaaggaactgatatttgagaatttctttgggctaactccaaaacagtattctttaaatctaaaaatttatgttgatattgtcccattccaaaaatcttttcagaaggctcagattcaaatctagtagttacttcaaattctccactatagcttggtcgatattctcttgattttaactttagagtagagttaaagtctttggtaatctcaattgtccctacatcttctccaccatcatcatgttttacagctcttaatcgaatatattctttcaataatatttcatttttatcattataaaaagtaattctatctctatggtctaagacagcttttatctttccatttttaatgattgcacttccatcttcatttttattaattgtaatatcatctttatttaacttaggtttttcgttaagagcatagttttcatcaacaaaattttggtctacaaacgacctaatacgtaaagagttttttccccatgcttctattcgcaatagttcattgtcaaatcttttttcaatatagtcttcagatatttttatcacggctacctcctaaatcaatggtataatattctatctttgtgtagcttaagttaaataatgtcgtttagtatcgttatttataaattaggttttatatataattcatttgtacattaaactaacttaccaataatatactttatttgactttgtttgtcaatcgctttccggattttagtaaaattttctaatatgttgcttgaaagtcgttcttaatatcttttatttatacttttaatatctgtgatgatacctatatacatctagttttttttaaacacatacaggaataaaatttgcctattatgtagataatattggacttgaaaatatgtatagtgaccttataaatacagataataatatattagatattgttcaaaacaatggattttataattataaataatttatgaaattatttaagaaaatatataattgtataccaagtcaaaaacgacaacaaataaataaaactaaaaaagatgttgtctcaaaatatagataaatttatttttcattgctaaaatgattaaaatatatttgatttaatatacttgatttaatataaaaaaagagtgtctcataaactaaaaagttcacttttagacactcctttatatatattatcaattcatttattacctctctacattttctttcagctagtagatacatctttataagtactaattactccacttaaaaatgattcaggtactgtccatcagtcatatttttctgccaaatataatggtgtttcataatgagacaataaatatttatatctttacttatcttctctaagctcgtcaaatccaactataggtatctctaaattatattctttaagtagcttttctagctcttctataaaaatacctttcccatccaccatttgtatatcatttattttatccatcaattcattgcaaccacttagctcaccaaaccaacgtttagaactacatgtcttattataaccacaacttggactaccatctattgcaatgatactttttatatcataatcattttttaaatattcattaaactgccttacatgaggtattaacatttgcctacattgttctctaaaaaacaaattgtcaaactgttcttttacatgtccccacctatttattccatacataatcatttctgggcatggtagttgaattattccataccctttatttattaaatttatcgctatattttgtgctcccttaaattctgacaatccctctactttagaattacaatttaatatacaatgacatactactacaatctctctatttctcttcataataatctccttagttattcttaattttaatgatactacatattttgataattatattatttatttgttctatatttccaatattctatatagaaatatacaattagtaatcttttataatctatactatgataaatgtatatatttttttaggaggtattataattggatactaaaaaagtcacattttcttcaatatgcatagttattaatattgtcttaggtatggttatatctatgataaatataccattattatttttagatacagttggtactgtacttggggctgtcgtattaggtcctttttggggtgctcttattggtgggtgtacaaacttagttttaggtgttatatcaggtcctacaaatataccttttgctcttgtaaatattgttcttggtcttattgttggatatatttctaagaaaaaaggttttggttataaagaagctattattacaggagtaattttatctattgtttgtcctttaattggtactcctatttcagttttattgtttggtggtttaagtggaagtggtgctgatttattggttggttttttagttcagtctggtcagaagatatttactgctgcgttctttccaaggattcttagtaatatagtagacaaacctttgtcttgtattatggtggtatattttataagtaaaatgcctaaaggttttataaaacaatatagtaaaaatacttctagttcatattaataaatcatttattatgtaagatttattactctttaaaatgctatatactcatttttatataacatttttattaataatttaattagatagtatttgtattattttaattaaacgtaacctcttgatataaatttgagctataaatctatatcaagaggtgctattttatttttaatataattaatattctattacgcaaaaaatgcatatatttcattattttatggaaaatattacttcatttaactctatatcaaactcattaagtaaaaatctaattatatttaatttagcctctgtatttaaatttgtttctaaatatatattttctgatattttaataccttttcttaatttatatacatctctagacttaatattatctataaaatctcttttataagtcttgtctacaatactgttaaaccttacagaatccaaatcatataaagtaagagcaacttgttcataaaattctgtccaatttttagccttatatgactctcctaatatactaaatgatactatactttcatttgtaaaattaacatcatcatcctctaacgtaaatatattttcactgttacttggaggttcatatgtaacacttggatatttccaaatttctacagctctatctagtaatatcttagttctattttttatttcttcttcattccatttatctatagatgaaatatatttatttagataaagcctactatctttaaatccatcttccatttctttcttttcttcaaatgttttattacttagttttgaattatatcctgtcaaagttaaatttccaattgtatgtaaatatttatcatgtatctccttatagttatctcctagtgattccttccatttatttgttaatgtctgtggcattatatgctctatatttagcatattattattgattaaattttctaaatcaacaatttctttattattataattctctaacctctcaagtatatataacttattctttgacttagtattatatatatctttagtttcaaaagcatttgaaaattcactgtcagtaggaaatctttgagatgatttcttatttataaaaatatatcttaatatattagaatagttttctttataatcactaaattttttaatttcccttcctaagttcataaatactttattcagtgcattcggaggtacatcacatactattcttcttaatataaaacattctactaaattaagggattctacaagtacttttttatttattataccttcattataatcattaaataattctaatataaacggatatgatacaaatatttcaagtttgtttatccttttcaaaactttgtttacatcattatcatcagtacatgaataagatatctctctataatagttagaaaatttaagtaaatcttttaataaaatttctatatctataccattatctgatacataccttttaaaactaaaatatactttatttttattcggtatacttctctcctttatagtcaaatagtctcttataaagctacttacgttgctacttgtatttttttcaattttataccaataattattataaaattcctcttgtaacttagagcttctacccattaacacaaagtttcttactctatcagcttcacttaaatctaagccagttgaatttagactttcaaagattaattgagggtcatcttcaccattttttaactctatttctactatagttaatttctgtatagcatcaaacaaatcatctattgatatattatcttcttttattctattataaaaatataaataatttgaaactatattagaatttctatctgtattcatttcttcttcaaatagttcatagtaagcttttctatcttctgctattggttttaactttatttttccatctttatctcttgagtgcttgtttataagataacactccttaatctgttcttctgttgtaataattccttttgattctccaaactcttttattatttgacacatggcaatcaataatattgacacagtagtcactctttgttgtccatctattattaaatattcttttcccatactatatatagatacaactgaccctaagaaatgagttctaaatccagaatctattatatcctctaaatcatcaaacaatcttttacattgttctttcttccagttataatttctttgatatacaggcactacaaaacttttgtttgacccctctaaataactaagaaattcaatttctcctgctttcatattaactccccctataagttaaataaattccattcataactccatgtatctatatattatatcaaaattttgactcataaatgtatatgaaagccttattatatacctttttatacctatttttattttattaaagtaaatacatgattattctataaaatatacaaatacttaattttaaaaattattatttaatcttcttcatgagtaattcatagttatttatcaattaaaaagagatattgcataattattcaatacctctctttgtatatttacattatccatatctagttatctatttcaacccaatattagactacctactaataaatttattctctacataattaacaataattttgcactaaataacatcattagcctatctctgatgcattttctttaattttatttatagttttaatcaatttatttctctcttcaatatgattttcaaataaatcaattatacttccaacagttctaaatgggtcttccatcaacactttgttatcctctataaatccattcttgactacataatcgactataagtttaacaaaatgtatttgcttagtattaaaactcttattatttaaaaactctgaaaaagcttcatttgcagcttctctatccaatcccactagttttctcactaattgacttactggagtatctccaaactcctttttataatcatcacaattacctaactgctttaagagtatttcctccaacgtttcaacatcttgctttgttatctttttattatttcttaatttaaatattgctaattcatctttatggctatttaaataatactctaccttctttttataattcttaagattgtttgcattatatacagaatcatttctatcttctgctacaatcatatcttcaaaacttgtataatatatcttttgactagacttttcaagatacttaataagctctcttaatgatatacgtacttcttctacctcaaatatatctgaatcttcccaaaaatcctctgtcattgctttttcaatagtatatttttgttgctggatctgtggtatagtcccaagtttcgaaagtttttctgctgtaaccattacatgccttatccctttacttgcattattattttgtaagtatgcaagttgtatattatacataactacatcaaatcttttagccaattcatcatcactatatgaagttatgagtggtgatatatattctcttatctcattttgtgctactgctccaatattgctccaaacattttcatttttatacttatgtacataacttaaattcatcctaactatataactatcctcatttaaagcttttacagaagttataagttcttctaacaattcttttctaagttctgcatacttaccttctatatatttaatatcttgaagttctttaaccatacttacctttatattaaataatttttcagtaagtgtttctgctttatttccctcaaatcctttaggattaaatttaaaaaattcaaaattattacaaaaatcaaatattaagaatctttccttatccatatcaacacctaataaatctggacataatctagttcctctacctatcatttgccaaaacttagtcttacttctcactttcttgaaaaaaacaagatttaggatttcaggtatgtcaattcctgtatcaagcatgtctactgaaactgctatttgaggtaatttattcttatcagaaaaatcatctattatagaatctacataatttatactatagtcaactgcttttacaaagttcccaccatactttggatacagtttattaaatctttcaactattgccctagcatgctttgtattctttgcaaaaattatagtcttaccaatcttttcttctccttctattttcaacccctctgtcattagcttatttaaaactaaatctattgtgtcagaattaaatagccactcatttactgcattattccctatttcgtctccaatactctcatcatcattaaatgtattttcatattcttccttctcttcatcagaaagctcatcatacttaattccatcttccataatcttagtcttaaactcaatactagtataatctactaaatatccatcctcgactgctttattatactcataagcatatgtaggtactccattttccatgtcaaaaactgaataagtatttttatctatctcatcctttggtgtagcagtaagacccattaagtaagaatcaaaataatcaaagattgacttatactttttataaatacttctatgcgattcatctattataattaaatcaaaatgaccaggtgtaaacaatctctttccatccttagacttcgtatcatcaattgcattcatcattgttggatatgtagaaaatatcatcctagcatcttctgggctgtctttgctatccaataaattacataacgccaagttaggtaatagcttagtaaaactttttttagcttgctttaccaatgcttttctatctgctagaaataatatatttttaatccaattatgtcttgaaagtacatcaactatagatatagcaattcttgtttttcctgtaccagtagcacataccaaaagagttttgcgttgcttattttcaagagcctcacatacagccctaatagcttctttttgataatatctattggatatttcatcatttattgttacagaacttaaagacttcttactctttcttctatctatcataagttgtaattctgattttttataaaatccataaacttttctatctgaatagtcatcccaaatatacatatcaaaaccattcgtcaaaaatattactggtctttgactatatctcttttccaaacaatctgcatataatttagcttgttgttgaccaattttcgggtctttgctcgttcttttcgcctcaactactgctaatggcttaccattttcaccataaagaacataatctacatatcctacaccactttcattaggcataccttgtacttctatttcctcccctatatcttttccaaattcccaacctgcaagctttaattctatatttatatatctttttcttgtctcaaattcgtttacttcgtctatcttgaaatcgtagtttacagtattaacttttctcttttcagttagtgactttcttaatttctcattttcttttattacttcttcaagctttttatcttttgaacttaatctctcataaagatttttaagctcgtctggtctcgtccttttctcttccccatgaagtaataaatcttcattaaagtcttctgctgtatattcatctgaataacaatagtctatccaactaacaaattgatgcaaattgttaagtgaaagtattgcttctcctctctctatgttcgcactagtatgtacagataaattacctaatttaactatatattttaataaaggtaacatatcatagtctataagttctataaaactattattatgaatcaacgtactaagattatcttgataaggcaatactaaatcactatcattagcatatagccattttactgcaagctctaaagctcttcttgttatagttgcacaagtagatgggctaactagtatacttttttctgcttctaagcaagcagtattaaaactattgaaatttttcttcttttgtaaaaagtcaaaattacccaaggcttttctcccccttttgtcccttagttaaaataaatctctctaaaaactatttcttacagctgtttcttatactaacaaatacttcttcattttctgtaaacaattcgtacatatcttcaaactgtggtatatcatatccatgagaatcatcatttctcaattttctaagtgtttctataactatagaagaatttttaggtaataaattgtgatactcacaagctaaaaggtagtcataaaagtttttagattttatgtttaaatcaattgatttataatacaacattgcttttgttaattctaaaaatgagaccatatagcttttaaaaccttcttttatgtatctagcccataactcaggcatttcttccttatcatataagattttgaagttttgcaggtcatataagcaagaaccaaaatccctatttacttcttctattgagttccaagataatttgtttctaattaccatacatgtccctccaatctaagatatctattacatcactgttttcaaaatagaatttatttatataatccttaaaatctttagattcataaataacttcaccttctaaaatagcttttttaagtgctattgtataattatctgtaacaatttttaggtctacatcaatgtctaatatatttcttagagcttctgtcttagttgcaagttctgtaattggtacttttttgataggaatccaagctatgtctatatcgctttctgatgtatgtttatctgttccataactaccaaatattatgattgctagagtattttcttttggaaatacatttattattgagtttttaatctcatttggtatatttctcatttaatcacctcttgtttattaggtaatattgcttaattgaatttatatccataatcttttaatctatttatacatatttctctttcttcatcagtaaacaactctttatacttttcttttaatactaatacttctaatgataaatctaatctcttacactcccatagccttgtaaatccttcagtagctccttctttattgattaattctttagcagctaataaggctcctttgttatttatcagttgtaaaaatcttgttggcttatagttacattgtaaatcagcttctttatagatatttaccatgtcatgatataaatctagctctatttgattcatagattttattcccccattttaatacttgtatttcagttgaacaattctcctttaaaagctttttgcattaatgagttaaagttatcttctagttcttttaagctagtttccatttcaaacttcaaagagtttacttgtttaacgaagttggcaaattgattttgaagtctaataggaggtacaataatatttatttttctaacagcatctttagttatcgtttttgttacagctcctcttactttctcttttattttactttccatataggatgttagtaaaaggttatataagaatatatgattcactttatcttcattaaatctaagcataaattgattcatagctaaagatactggtttatttaaaaatggcattaaataaactttacctgcactacctatcttatttattataacctcaccaccaaacacctttgatttttcaagataattatatgcatgttcatcgatatacttaacacctttttcaaagttattattttctaaatctgtagttcttaccattaaggcataaccttttgtatctaaaagagttacattatctcttaaggtttcataactaccatttgaatgataatcagttaaaacatctaaatatttccctatttctgaaatttcccagtttttttcgttctttgatggggtaccaaacatctcaataaatcttgatttaactaattcatccaatacttctatttgctcttttcttttatctattaactcttgagccttgtctaaaacacgcactaccttttcttgcacttttaaattatacatgcgtatttttatattagctaatccttcattatttaaagctgattgtgtagcacctttacttaacctatttttttgatttagaaaataactactatttaagtaatggtataaatattgaggcaatatttcttttgatggttttaaaacataaaagccagtcgatactattatatttttattagttttattaataactagtgttttctttgtgtccttcatttttgcaaatataacttctcctatatttacagtttgatttgctctagaaggtttattttcataagtaactatttctagattgcttatcttgttaaaatctaagtttccagtactaagatatgagcgttctccatcaaacttttttacattttccctgcttatactaacaacatctaaaatttttgcttcatcaaccatactctacacctctaacattctttctagttcctctaatccatccactatctctttctctaacaccttaaccctacctataataacactaggagcatcataaactacttcctcatacactacctctttatacttattaatagataaatcatacccattctctcttatctcttccacatcaacaaaaaagctttgctctgttctttttctatctacttccccatcaagattatcaaatctcttaataatatcctctatatcactatcctttatctcatttctcttatcatccaaagaataaccatcagctttcatatcatagaaccataccttatcagttccacctgtccctgttttagtaaatatcattatagctgtagatacccctgcatatggcttaaatacaccacttggcattgatattatagcttccaatttatgattatcaactatttcttttcttatcgatttatgtccacctgttgaaccaaacaatactccatctggcactatacatgcgcatcttccaccaatttttaaaactcttaaaaaaagtgccaagaataataactctgttttctttgtcttagtcacttttaataaatctgctgacactgcttcataatctaaacttcccttaaaaggaggatttgctagcaccaatgtaaacttatctttatctgtattaacctccgataaagaatccttatactctatattaggattgtcaacgccatgcaacatcatattcatagcacctattctaagcatagttctatccatatcaaatccatagaacataccattattaaaatgctccttcagcccttgcactaagaaaagacttgaatgattatcccttaagtactgttgtgatgatactaaaaaacctgccgaacctgctgccgggtctactataatatcttctggtgttggtttaataagtcttactatcatatctattatgtgtcttggagtcctaaattgaccattagtacctgctgtagccactttggataataaatactcatacaaatctccctttgtatctctatccttacttaattctaaattactaataccatcaactattttagataacataagaggcgtaggaattttaaatattgcatctcccatgtactttgcataagctgattctttatttccatgtaatttttttatgaaaggaaacacttcattttgtactatttcatacattttttctgagtttccttcattagaaaacttactccatcttaaatgttgatgttcatcatcaaatatcttttcaaaagaaacacccaaaagagttgcttctgcttcattttttgtttctacttcatccaatcctttaataaataaaagatatgtaaattgttctataacttctaatggattagttaatccaccagtccaaaatgtctcccaaatcttgtctactttactccttaattctcctgtaatcatatatgactttccctccagtgttcataaaataatttaaatatatattttagtcgtacgccttaatagttagtgtcttatgttaaatccaagtttttactacacaattattaaattatttttcccatttacatattttagctaaaaaactaatgcaatactcttattttatgattattatatataccatacaaaattattttatcatatatccatcatagaagtcatctacctggataactcttaccatattataactttttaatattaatttaaacttagaaagaaattttttatttaattatatcatcttccttatttcaaatttctcaactacaatcctaatcaaaaaataaaataagatgctgtctcaaaatagatataatcttcttttttattgtcagaatgatgaaaatatatttgatttcacacaaaaaagagtgcctcatgaactaaaaagttcattttgagacaccccttaatttaatcttacttattctttccctttattattaacacttcactgtccctattgcttttcctacacatccacaaacttccatcctactcttaacaaaatctttaactgactctaaaccttttttaccatatttcttagggtcaattacctctgggtcagaattaagcacatccttaaccccattgctataagcaatccttaattcagttgcataattaactttgcaaatacctctttttatagattccttaataacctcatctggtattccagacccaccatgtaatactaatggaactgatacaacctctctaatttcagataatctatctaaatcaagctttggctctcccttatatagtccatgtgccgtacctattgctactgccaaagatgatacccctgttctctctacaaactcttttgcttctaatgggtctgtatatgctccaccatcaccaccatctaaatcgtcttccttacctccaactttgcctaattcagcctcaacaggtatatctgaaggcatacatgcatctacaacagatttagatattgaaatattatcttcgtaactttcatgagaaccatcaatcataatagaagtatatccaactctaagtgcctgcatagctagtccaaagcttgaaccatggtctaagtgcattgccactggaacacttgccttctctgatgctacctttacattcgctaaataataatctagccctgcatactttattgttgaaggtgttgtttgcaatattactggtgatttaagttcttcagcagcctctattactgccataaccatctccatattttcaacattaaatgcacctactgcataatgcccttcttgtgcatctaataatatttgtttagttgtcactaatgccataatttctcctcctatatgtttatactgatttgatttcttcgttatttaattttgatactatttctctacttgttttgctatttaataactcatttaaaaattcttcattcattaattttgaagatagttgagataatgtttttaagtgtaaattatcaccattatctgtagctgatatcataaatataatatgtgccaagcttccatcttctgattcaaagtcaaacccttcttttgatacacctactgctacacgtggtacctttactgcatctgtttttgcatgtggtatcgctatccccataccaaaacctgtagatgatatttcttctcttttaaggatttcttctttaaacttctttttatctaaaagaacaccagatttatcaagtattccaatcatttcatcaattacatctgttttattttttcccttaacatctaaaattactgtttcttcgctatataaagagatattattagatacgttttccgattctgcactttcatttttatgtccatcttttgttgcatttgtattttctatagtatttttctcatttactactttaggtgtaaccatcatataaagtacagcacctactaatgaacctacaaatatacaccctacccataaaagtggcttattgactaatcctagaaccaaaaaccctccatgtggagctggtacttctattttcattatataagttaaaattgatgatattgatgatgcaatcataagtactggcaacacttttaatggattttttgctgcaaaaggtattgccccctctgttatatgagtactacctagtatataattgattaatcctgctgctctatcttcttctgtaaatctatttttaaataaagtagatgctattgctattaccaatggtggtgttatacaagctgcagatacacctgccataaataaataatttccctgtcctagaagcatagttccagttacatatgctgctttatttactggacctcccatatcaaatgctgacatacatcctattactattcccaaaattataggacttgaattttgtaaccccgatagaaagttcatcatagcattgttaagtgctgaacatggtccaccaagtaacaacattgctacacccacaagacctacgctgacaataggaattataaaaatcgatttaagaccttctaattgtcgtggtaattttcttaacaaatgtacaaatagtttaactaagtaacctgctaaaaatcctgatatgattccacctaaaaaccccgaacctgtatcaaatgatatcattcctccaacaagtcctgccaacataccagctcttcccgatatagattgagctataaatgctgccaatacaggaaccatcaagttcatagaatatccaccaacagattttaatgtagctgctatttgattatattgttctgaatttgggtcaaatgaataaatcccccataaaaatgatatagcagtaagtactccacctgctactactaaaggtaacatgtgagatacaccattcattaagtctttatacaacttttgaccaaacgataaatttccttcttctgcaattttactgcttgataagtttccttttctaatagctacttttccatcaatacacctttgtataagttcattagccttatgtataccttctttgacaggtacttctattaccggctttccattgaatctgtccatatcaacatttttatcacaagcaactattattgcatctgccatttcgatatcttttgctgttaacttattttctacacctatagctccattcgtctcaacttttatgtcacaccctaattcccttgctgaattttttaatgcttcttctgccataaaagtatgagctattccagttggacaacctgttacccctagaatcattttctttcccatctttataccacctttctgactcttatattttttatataatcttccacattctccaaattacctataccattactttcagccacacttgctcctgttgctgctgacctttttaatgcttcttcaatatgttctggattttccaaccatatacttaaaaaagcagctaatgcagaatcaccagcacatgcagagctgactactgtaactggttgagcactagcataataaattgattttccattataaaaataagaacctttttctcctaaagttagcaatatattttgagcaccttttaaatgcagtaatttaagtacatccttaatatcttcttcatctcttacaataattccaaatatatctttgatttcttcatcatttggttttatcaaatatggattatactgtagtaactcctttaattttggtgaacttatatcgagtattgtctttatacttttatttttacaaattttaaatatatcctcatagtaattatcatcaataccaggaggtagacttccacttattgataagtaacttatatctgctaatgactgtatcttatctagcatatctagtttttgtttttcgtttacatatgacccagagtttacaaatttaaattcatcacttccatcatttaaaaatatatttatacgagttgtatcttctacccaagtaggtaatacgtcaaatcctctcttttcgctttcttcaactatatattttcctgaaaatcctccaaaaaatcctaatatcttagattctataccataatgacctagtacaaaagttacatttaatccctttccattaggagaatatacagcatttgatgtacgatttactaattttctctttatcccattagtagatatattcatatctattgcaggattcgtagttaatgtatatatcattgtcttcccccttgcttgtgctgtgtatgttttcattataataaaaaagtctatgaaaatcttttcacaaatagaaaatcgattttcatagacttttcaatttaattttcagaattattatatctgaccatataatctataattatcctagatataatatacaagggcaatctggaagatacttcatattcagaaattgatatatgttcatgtttgtatcctacaatatataaatccgaatactttataagttttgcactttcactacaacagcaagttataaccttagctccaactaaattggcattctgtgctgattctacaagctctatggtatttccattcaatgaaaatatgattataagttcgtctttttttattgatttagattttattttcattatgttggggtcatttataaaaacaacattaaaatcaagtaattgcaatttaagactaaactcttttgctacatattcagtaagccctcttgccaaaatatatatcttactagatttatttatagtttttattatattgattagtgtagttaaagatatttgttctataactctctgtgcttctataaaggatttatttattatatcccccatattttgtatatcatcattttcatcttttactgttaatctatacctaagttcattgaatccatttaaaccacattttctaattgctcttgaaacggttgctggagatgaatatgtttcatgagcaatctctactatagataattctggtaatattgattcattttcatttataaatttaattatttcaagttccgtcttcgttagattttcagaattacttttgtttagctcaattatcatatgttatctccccttatataagttttatttgtctaaatttatcgagtaatataatatattacctcttaactacttatttttatatacaattaagatttagtcaatgtctatatatgtaaatttataatataataattttatgcttcaattaattatgtaattattagagtattttgtaataaaaattggagttactcaattactgaaactgagtaactccaattcttacagcctcaaattaactcgaattattgaaaatgattcataaacattatcctatactctcacttatcaatttatatacttgagtaatacctttttttattaacagaaatcatcttactaacaattgaaattgtagttccagtacataatattgaaaatatagttccaaaccctaaatttccgcctaaatatacacctaaaattaaaaatattaaatctgctatagtttttaaaactttatatggatacttaaatttgccctcaatatagattaatatagcatctaaagggctcattccaatgtcaaattttataagcattgcaaatccactacacataagtatatgtccaattataaagctcattattctaatgataatccctaaactacttatattaaaatctaataataaatatatatacaaatctataaatattcctgctactaatacataaacacagcttcctaatcccaaactttttttattcaataacaatgctataagtaatagagttccattatatattagccctgctattgtataacttatacctaactttatatgtataccctcatttaaaagtgtaattgcatcactaccaaggcttgactgaagtataagagatataccacatcccagtatatttataattaaaattacaaatataaatttttttatgacattcataattaataaaccaccttatttataattataatccctcttataaaactgtattaataacatagtatttataagagggattatttatatttaaaaactatctactttttcttttaattcttctccattagttcttattacatttttataccaataaaaactatcttttttgtaacgttctttgcttccatttccattgttatctatatctacatatataaatccatatcttttttccatttcttgagatgaacaacttactatatctattggcgaccacatacaataagctaatatttcggttccatcagctatagcttcacctatttgttctatatgttttcctaaataatctattctataactatcatgaacttttccatcttcaaatttatcatgcattccaaatccattttcagctatcattattggcttttgatatctatcataatattgagataaagtattgtataatcctttagggtcaattgcccacccccaaggatttgcttttaagtattgattttttacattatcaattggattcatggtatttttacttgctgatactgttgtagagtaatagtatgatagagctagaaaatccatagtattctcttttaacactttatcatcaccttcttccataactatatttatgttattttctttgaagaatctcttaatataagctggatactcccctctaaaacttacatcagtaaaaaaatattgtattctatttctttttaaagcaaatactacattttcagggtcgcaatcttctggataagatgtacaatctgccatcatcatccctatcatcatatctgaatttatttcttttccaagcttcttagttaaagctgtagccatgaattgatgatgaatagcttgatatttggcctcttctacatcatctacctggtctacacaaaatgcaactgaattaaatgattcatgatacattaaatttatttggtttataactatccaatatttaactttatctttgtatctatttaatattaattctgcatatctaacaaagaaatccactacttttctattagaccatcctttatattttaatactaaattcaaaggagtctcataatggagtagtgttacaataggttccataccattatctattacttcatttataagattatcataaaactttaatccctcttcattaggctctaaatcatctccatttggaaatattctagcccaatttattgaaaatctaaaacactttaaccctagttctttcaaaagctttaaatcttctttgtatgtatgataaaagtctattccattacgcttaggataatacccattattatctttcatagcaaactttattttatctacagtcatatcagactcgtaatgtttagatatatctctatctttatcatacatatgtacatcagctaagcaccaccctttgccaccttcattccaagcaccttctaattgattagctgctacagctccaccccacaaaaaatctttaggaaacttactcaatttaatcactccttattttatttatttaaatcatttactattatttaccttatattctatagactttactattcctactaaagacatagttatatttaactcgctgaatattgtcataagagtatcttgagcatgtgcaaataaaagtgaatgtgctcttttttctccactagcttccccttgtataatgttagtttgagctctatgtgcttctgtcataaactcttttgctttagctagttttaaatcagcatttttataatcaaacctttctaaatcattaagagcatgtttaatttctgttctagcctcacctgcacgaagtattatttgcattgctacttctactaattcttcatctattacatgttcttcagttgtcatatttataatttcctttcaacatctaaatttaagcttcttgactctctaattttagttcttctttttcataagctttaaaaaatggataccatatcatgaatagcaatactatatttattgctaaaacaataagccctctaacatcttgatttaccataaaagtagatataccaaaaggaagataccataaattaaacaccttactcggaattgtcacaaatcccatactcattgataagtaagtagttattgatattactactgttcctatccacataggtaacattaaaaatgggttccatgctactggagctccaaacattactggttcatttatgttcattatagaaggaacgatacaggctcttccgattgcttttattcttccagctctagataaacacatcattagcactagtggtaatgttgctccccacccacctaaagttatccaacctgtttgaacaacttcataagtatatatattagttgcaagccctcctgatgctacagctgctgcattagctgcaattgcactaagctgaattgcataagttattggggataatacccatccacttatacctaaagaatataaaaatactactaagaagtttaatagtacaaatccaggcaatgtttgtgctatatctgatactggtttaaatatcctaactattatttcaaacatatcaaagttaagtccataaattagtccccaacctataaacattattactgctataggtaacatactatcaaaccacttacttacaaaatcaggaagtgctgaatcttcaccaaaaaatgagaaagacccaaataaagacattattaatccggagaataatcctgcaactagtgctacaagcattccttctcctccaaatctattgaagttaaatatagctccttcattcgtaatctctggacgaatcatcattaacattaatccagcacctgcaagaccagctactacactcatactttcaaatttcttattcttcattatttccataggtaataaaaatgctataaatagtcctaaaagtccaaatgtatattgatttattggacttaaatcaggtaagaaacttatgtaattcttcaagacagaaactatagttactaaagaacctacaaataccataggcaaaactttcattatagttgattgaactgattgtacccatatattcttagttatcttatttacaacaggagtaaacttttcacttaacaaatctataaatttattcataaacaatctccccatagatattttatttgtttaatattaattctaatgcttcttctaaagcctttacaccatctaatcttccatatgctgttttagatatacatgctactggaacattatattcatcagcttttttttgtatttcatctttcatataatctaaatgtggtcctaataataaacaatctatttctggtaaatatttatctatctctgactcacttctagcttttatatctgcttctatgccttttttctttgcactctttctcatactagttgccataaaacctgtacttgctcctgagccacatgccaacaacacttttatattcttcataacaatacctccagtatttttattcattaatttatttcttaatgaatttttatttgatttgattgtatttatattgtacttcctaaataatttcctttcacataaatatatttcctaataataggaaatcatttactcttaaccagacacataaatatatagtataatgtacattataatacgtacattcaattatataaatatcatatcatacagattttattttaaaactatgagagggaatctaatgaaaacatctaaaaaagagttatttttaaacttcataaaaacgcaacatgattggatagattcatccacattagctaattatcttaatgtatcaacacgttcgattagaaaatatgtaaatgaaattaattctactggtgaatttatattatcctctaaaaaaggatataaagtaaatctcaataataactgtcaaaccaaggttgatagttcagaaaatatatcacctgataacaggttaaatttaattttaaaagaacttatagttaatagtaatggaattaatatatttgatttaagtgaagaattgtttgttagtccagctactattgaaggggatatagtcaaagctaataaatttataggaagttataatttaaagataaagcaatcgaaatttttattgaaactaattggaaatgagtctgcaaagcgcaaattaatgagctctataatatttaaagaaacgggaagtgattttttaagcttatttgatgtacaaaaaatatatcaagagtataatttgaccaaactgaaagaaaatataatatatatattaaaaaaatacaatttgtttataaatgagtacgctataaataacatacttcttcatttaatgataactatagacagaataaaaaagaataactacatagaatctgtcgaagtagtaaactacatagataataataatgatataagcatttcaagagatatatcaaattttttagagtctgaatacaatttaactttaactagtgcagaattatactacttagtatttcagttaacaaacaaaaccacagtcttaaattatcatgaaatggatactaagtcattgccaaattatatagatgaacattttgttaaattaactaaaaaaataattaaaaatgtatatgacttatactttatagatttatctgatgatgaatttgttgtaaaatttactcttcatgtaaaaaatttaatcagtagggctaaaaataatcaagttttgagaaatcaaatacctcagaagttaaaagattcctaccctctgatatatgatatatctgtttatatttgtaatcaaattcaaattttagaaaacatagaaatagatgaagatgaaatatcgtatatatctcttcatgtaggttcattttttgatagacaaaaattactagaagataaaattctctgtgcattaattactccaaattactatgatttacaattcaaaatagtaagagacctcgagaagagatttaatgaatccatagaaattattcaaattttttcagatactcataatcttgattttgacaataaggtagacatggttattactactttaccaattagtgatagatgccctataccttttgtttatgtaaatccttacctaaacagaaaagattatgataatatccaaagtaaatttattcagattaaagatagaaaaaatatacttactgtacaaaatcatttagaaatgtactttagtgaatctttgtttatgaaaaacatatatttagatagtgctaaagattacataaaatttatgggaaatattctgtacaaaaataaatatgtcaaacccaattatatagatgatgttcttataagagaaaaaatgtcttcaactgcatttaataacaatgtagcaattcctcatagcatgaaaatggatgctttaaaaactggagtatgtttaattgttaacgataaaccagttaaatggggtgaggaaaaagttcaaattatagctatgatacctataaatgaaaaagaaaaagaaaaattcaattacatatttgaaagctttattgaaatattatctgagtggaataatgttaaagaacttactaaggcagataactacagtagttttatgaatagaatagcttatcttattcaaaatatctaaatccattaatttatttccaatatatgtttcttaagttattaacacaaaatagataagctgtcacactaaaaagtctaaattaatatgtgacagctttttacctaatatactttgctttaatactacatattttttgattgttgtatactagttataagattgaatatttgtgttgttgtagctgtcatattctcactagcagttgctttatccattgcttcttctattgtcatagctctatttactatagaaaaataagcatctataccctcttcattacatttaactgcatcttctgttgtggctccagccaaacctattacttttaccccatatttttttgccagttttgcaactcctattggagccttgcccatagcagtttgattatccaatctaccttcaccagttatgacaaaatctgcatcttttaactcttcctctaatttaatttcttctaatattatttttattccagattctaattttgaatttaaaaatgctaaaaaagcaaaacctaatcctcctgctgctcctgctccttctacattagctacatctttacttaagtaatttttaactactttggaaaaatttctaagcccattatctaactcctcaattatttctgatgttgcacctttttgagacccatatatgtatgcagctccatttttcccaaacagcggattatttacatcacaggctattttaaacttacattcatctaattcctttaatctattttctatttttatatgtcttatttcatttaaaacttttccacctaatcctactaacttgttattttcatcataaaactcaaaccctaaggcttgaagcatacctatcccagcatcattagtagcacttccacctattccaactataaaatttctatagcctttatttattgcttcctttattatttccccaacaccataagttgtagtgtataaaggatttctaagttcagtcggaaccaatgttaatcctgatgcttgagctatttctattattgctgtacttgtattttttaataatccatatgttgcatccacttttttagctattggtccagtaacttctatagtctcttttttaccattcatcccttgaactaaagcatctactgtcccttcaccaccatcagcaagtggcaatatctttacttgcgcatcttctttaaccttcaatatccccttttttattgcatttcctgcctctattgaagataaacttcctttcaaagaatctatagaaattaatattttcatatttatctactcctttttatttactctttattttaaatatataattttataagcttaatttatcttttattttatactctatatttcactttgtatacaacttatacccttaatattcttttatcttataaaaaagggagtgtctcaaaatgaactttttagttcatgagacactctttttgtataaaattaaatatatgtttattatttcaacaatgataaggaggattatctctattttaagataattcctttttagcactatctaatcatttttagcactatttaaccaatatagttttaacttggttcattaggcactctacatttacagagttattatctattgatatagattctaattctttttcatttaggttagtccatttagctgttttaatatttttgttaaatactacgttagctgattttgtttcttctttagaattgtaaaatctaactactaatgcctcttctttttcagccttttttacaacacttaacacaaggtccttattagtttccttaagtaaactatatgaataatctacttctatttctgattgattcaatttcatagcattatatggtattttattataagtttgtatttttgttaaatactctttagccatatttgcaacatttgcttctagtgtagatttttcatgagtgactattgctaagtctatttttatatctcctatcatttgagaatctggagtaggcaactttattcctgatggacgacctgggcgtcttgccatttcttctttacctaggaatcctacacttctaaataatgttatagctattgtgtcaaattttttccctactatttcaaactctcttgtactgtttgtaagaacagctactccatgctctttgtcagacaatccaacgaatgttagcattggatatatagaatctggtctttcactccattcttcctgttgccaaacttccatagcatcatcatacacacttctctttatatgtccaaactgattatcagacacagaaaactttgaagctatatttgttggtatataagttctaaccctacaatctcttgcttggttatttatattgaatactacatttattatagctttatcatttggaacatttataactatatcaaagtcaataaatgaatctgctctattattttttctagcttgtatatcttttggtacttttaatctataatttatctttatctcattattaaatctatttttctttatagtggaatttgctactatattatcgttaaatattaatttctcatttggaagtggtgaaaaatcatactcatctccttcatctcctccattttccatcaataatacattttcaaaagttttatttaattttttatcagatatctttaatgtcccgttttcattaacttgaatagtataaaagtcattatctaccatgtcacatacttcataagctttttctaacatatgttcaacttcttttatcatatacgccttataccccattgcaggtattttatctttaaagtttattgtatataccataaatgaatcatagtttccataatgaacaatttgacggtctattaatcctgcatctattacttctttatgtaccacttcaaaatccaacttattattatctttatcaaatatttcaaatgctttcattttagttataacttgggcgttcactatttcattcctattgtaaggcattaagttaaatgctactaacttatctaaagccatttcacaactcattgcatcaactattcttcttttgtaaaatgttattaattggtctactttttcctcagctaagaaaaatctattcattatttcctggtgaactttatctgaacaacaacatccaatgctgtcatgagcatgatttttcattatttctttccaaattaactctattaatccatgatgatattcaaatcctagagaatatgcaatagaagctagtggctccaatatgttggttatctttgattctattctagcatttgctgattttatatccattcttgttgagaatatacttctatgaaccctcatatatttcccatctaaaaattccccttttattgtatctatatccttatttttttctagctctttaaatatgttttcatatctacttaagaaaaattttctctctggataacattcttttaatttatatataacttcaaatatattcttttgaattggcatttggtcatgtccatttggaagtattatatggtcagtagttgcacccttatcaagaaccggtaaatatttatccattcttgttcttagctcatcttcattcattggtagatattttcctattgcataacctaatggaagtatttgaaccaaaacagaagacccatcatcactcttccaattaaactctgttttattagttccttttctttcagaacatcctctccaaaacattgagtattttatatcaaacccatttagtatttgcggcatttgagcactttgaccaaatgaatctggtaaatatcctattttcatatattctccaaattcatcacaatcttttattccatacagtaaatttctaagtatggattctccaccaactaccatttcatcagtttgagtataccaaggacctattattagccttccttcttgaactaatttttttattctctccttacattcaggcttaactgctaaataatcttctaatatagcagtttgaccatccatcacataatatggatagttatgattattttctaacatatccattatttcttccatattatttacaagtaatattctagattcctcagttgagaagtaccattctctatcccaatgcatatgaggaactatgtgtacattttttttcattgcttatcctccaaaacttatctgataatattttctgtctaattaaaaatccaataaaaatactactgagtttacacaattttttaatatttattttatcactataattaaacctttgatttaaatatctaataacgtatcttttaatgtatctttctttgatttttttgtttcctagttattattaataatattgctgatattatagctccaagtactgccgcaaagaaccatattgatgctataataaatcctgacatacttccctctaaaagcgccaatgagaatatccccgctccaggcacttgaagacctatattgaagaatgctactatagacccagttatggctgaaccagctactaatgatggtataacatggattgggtcctctatcataaatggtattgcaccttcagttattccagccaatcctaatatccaagtttgctttcctatttccttttctgattctgaaaataaatctctgcctaaaacagtagctattgtaactccaaaagctgagaccatcttaactgatgcaaatattgcataaggtataaaatttccacttgctattgctcctattgcaaatgtataggctgctttatttattggtccacctaagtcaaatgaaaccatagctcctattattgcacctagtagtattgcatttattccagtcatcccatttaaccaatttataagaccattgttaagtgctgctacaggctttcctattacaaataacatcaataaacctactaccaaagaaccaactactggatatacccaaaaacttacgaatccagctaatgtgcctttggctggtatattcttctttaaaaattttactatataaccagcaagtaaacctcctaacatacctccaagaaatccactacctattaaatcagctgctagacctgctgcaaatcctggtccaagacctggtttttcagctagtgagtaagacatatatgctgataatactggaaccatcaatgtacctaacatccctccagaaagctttcttaattgccataaccaagaaccttcttgattgtatagttcttgtaaaccaaatgcttgagatgctaatactgcaaatgcaagtatcatacctcctgccacaataagtggtattatatgagatactcctgtaagtattgctgattttacatcttttttccatgatgatttttcacaatatgatatatcagatgatttttctatataatcacctttaccttgtttttgtgctacttctaaagcttcgtatattatttcttttgccctttttagtggagctgctactgacgtttttatgtttggcaaatgttcaaatctttctgtatttttaggtgctacatctgttgcatatattattgcatctgccttttttattatatctggtgtatgagggtccaccataccattagctccttgcttttctacatacacatccacacctatttctttgccagctttaattaatgcttctgctgacatatatgtatgtgctatacctgcagggcatgctgttattgctaatacaattttttttgattcattttgaatcctaatctcttcttttatttgttctttcttttcttttatatctaagttattaaataactctttcttagtttttgaatttaacaacatattcatataatcttcattagacagtctagtaactaactcagaaagtatttgtatgtgtgtatttccaccttcactttctggtactgctattaaaaatattagctctactttattatttgagtctacgctttcccaattttctattggtgtctctaaggtcatagctgcaaatgcagcttctttaactgacttagattttccatgaggaattgcaagccctctttcaaaacctgttggagataaagtttctctgtacattacagcttctaaatattcctcataagatgttaacttgccttcatcatatagctttcttgctaagaactttattgcgtcttcctttgtttttattttttgttttaaaaaaacaaggttttcatttgtgattttcttaaattccaaaattacgacctccttaaatcatttaatgttatgaatatagcataaaataaatcatgaaaatgtttttttgaaattatacacacaatttcttcttaaaaaataaggatttgtgtatttatacacaaatctctatcttaaccagtattgttctattattgctctcataatcatcataattggaaccttatctgatatattgtacccatttacttgtttaattgttgaatagcaatataaacttatatctgcaatttgttgcaattgattttcacatatatgtgttagagctactaccttacaacccttattaactgctgtctttgctgcttctataacttctttcgtttctccacttaaactaagcgcgaaaaacatatcttgttcacctaattttcctatatcatgaagtacttcatgtctttggctatagtaagttatattatcatgcccacctctaatttcttttactaatatctcacataaaggaatgttttgacctattccataaactataatactcctagatttttgaattatatctgctactttatttattttttcataatctattagctctaatgtcttttttatatctgattcaaaaccattttttggctctttatcctcattttttaactcttcttttaaattgttttttagttgagagaaaccatcatactccatttttttacatagcctaactatggtatttgggacagtaaaaaatttatctgctaaagattgtattgataattttactatttcttctttgttttttctcatatactcaattatcatgtcttctgtatctgtaaatttatactcatatttttttgctctttcataaaattccatagtttctcctccatctattttattattcataagtaaaattcaaaaatattagctaaaattttcgttaatataattataatttaatatttttaatttattaatgcatactactctttttattatacataaaaaatgtgtacttcctatattgatagagatgattcaggtttttattttgatacatctctatcaatatttttttagaaaatacacatttttttcaaatacttatttttaattaaaactttaggtaatctattctttatatataattattagacttgaaaatatctttaaaatcaaccaattcaatattatttctttttaaccacattttaacttccttatcacatagcattgcatgttcatatactctctcttgaataagagaagatgattttataagactataatctataaatcctggatgagtaaccatcaatgttatatctttatctaaatttatatatttttcttcaaataatttaacaaaagatttatttaacttgtaaaaatcattctgaggatatttacttggcatgctaatacatgaatctaaataatagggacaacttggtataccgtattcttttgcagcatcacacattgctgatattgatacatcttcttctataccatgtatatcaatatactcaggcaatttactcatatacaacttgtaagtttcaatttgagcacaaacttcttcatatacttcttcataattaaaaacctctttacctgtcagtagttgcgttcttcttattttgctagaaacaaattttccaccttcatctaacaaattctttatcttaatatgttctttacaacaaggttctcctattactaaattaacatgtaaaccaaaacatacatcatcattttttaccatttctatagcttgtcttgaaaaaggcatattcaccatgattccagcacttgtaacaataccgttcttataagaagatattatccctagtgtaacaccttctgaatatcctatatcatctgccctaactactaatttcttcattttatgcatctgcctgctttctcaactcatcaagttgcatttccatctcatcctttactttaacaacatccgttcctatgatgatttgaactgatgtattactcaatttaattacccctttggctcctgtttttttaatattatcatcattcaaaatagtggcatccttcacttctaaacgtaacctcgtcatacaattattaagagtcactatattttcataaccaccacaatttttaattatctgcttagccatatatgaaaaattaccatgagaaagttttaaattcttttctttttcactaactttatcacctatctctatctcaacttcatgtcctggtgtttgtacattatcttttattattatatatttaaatgttacataatataatacaaagaatacaactcctacaggtataactaaccacgctttatctccataactaaaacttaagacatagtcaattatacttgctccattaaatgaacccaagcgagcacccagtaaatatagtacaactccacctagaccagaataaaaagaatgaattatatataactttggagatgcaaataaaaacgaaaattctattggttcagttactgttgccataaaagaagtcaatgctccagcggtcattgcaccttttacttcttgcttctttttatcttgtgctgttttatatatagcataagaaatagcaggtattgaaaacatcataattatgtaaaatcctgtccagaagaatcctgcatttgggtctcctgccataaatctaggaatttctcctcttataacttctcctgttgatgttgtatattcacccatttcaaataatatgtaagcatttaaaacttgatgtaacccagttggtattagtgcacggttacagaataaaaacaagaatattcctattgcaccagctcctcccaaccaaaaaccaaattgattcattgcagcttgtggatatatccataataaactaaatatatatgataaaattaaagcaaccactggtgatagtgtaattacacatttttctcctgcaaagaagcttaaaaatgctggaactttaactttatatgttttattgtaagtccatgctatacaagctccaacaattatcccaccaaatacacctgcatttaatgtatcattcaataactctaaatttgacttaaatatcatatatgcaactacggctgcaaccattacacttgtcttgtctttagactttgaataagcactaactgctcctaataaaaataagtagtccacatttgaaaatactatattagatatattagatatagctggcacattaagcatatttggaccaaataataatcctaatatacctgctgctggcattacagctattggcaccagcatagtctttcctaaaagtgacagttgttgcatcattttgtttaagaacctcttcatatccaatcccctttctatttcggtttaattttttgtgaaaacgatttattcacattttatattttaaatattatatttgtttaaacaaattgtcaatattttttattcattttatttttatcatttagtttcatatctaaatccttttaagtatattgctatatctagcctattttttaaatttattttttttatttttaaaatatgtttaaccatgtatttgaaacaacccacaaaatagttcaaatttatcctttttatggtttatataattctattttcactatacatgtctaaacacatttgatataatttgttcatatcagttcaataatattactaaagacctttaaggagggataggggtatatggctaaaaataaattttcagagatatatgaagtattgaaagaggaaatacttgatggtaaatatacaagtaatatgatgctgcctactgaacttcaacttattgaaaggttttcatgtagcagaaacactgtacgtagagcaatttctcaattaaacacagaaggatatgttcaaagtataaaaggcaagggtgttgtagtgttagaaaatagttgttctaatgatttttttctaaatatgcacaatttcaaaggtgtagaatcgattgtagaagataaaaaggttaatactgctactagtgttctccacttcagcaaaatcttaattgataataagttatctaaaaagacaggttttaaagttggtagtgaagtatattaccttcacagactaagatatattgataacatacctaaaattctcgacattaactattttctatgtagtatagttaaagaccttgatgtttctatagcacaaggctctatttataaatatatagaagagtgtataggtacaaaaattgtttcatccagaaagatatttaaaattgaaaaagctacagagcttgagttaaaaacgctacctctaaatgattataattgtgttggtgttattaaaaatagtgtatatactgatgatggaaagctctttgaatatacagaatcaaagcatacacctgaaacatttgtattcatggatgttactcaaagatattaaaaaaattatgtttaattaaacataatttttttacgtttagacactttatcccatactaacctcactattctatatacaattatatgtttatacaaataattatttattgtatattttagctttaatattagtttaatacttgacaatttgtttaaacatattataattaacttataaattacaggaggtatcaattatgaaaaattggtggaaaaaagcaactgtctatcaaatatatccaaaaagtttcaaagatagcaacaatgatggtataggtgatataaatggtattatagaaaaattagattatctgtattctttaggtgttgatttattatggttgactcctatgtacgtttctcctcaaagagataatggatatgatatagaagattattataatatagacccaaaatatgggacaatgagtgactttgaaaaactcttaaaagaagctcataaaagagacataaaaataatgatggatatggtcctaaaccatacatctactgaacataaatggtttaaagaatctaaaaaaagcaaagacaatccatatcgtgattattatttctggaaagatgctaaacctgatggttctgttcctaataactggatatccagatttagtggaactgcttggaaatatgatgaaactactaaccaatattatttacatttatttgaagaaactcaagctgatttaaatttggaaaatgaaaaggttcgtgaagaatgttacaaagtactagaattttgggctgataaaggtattgatggttttcgtttagatgtagtcaacctactctccaaaacacctggattacctgatgaccctataacagggccaaaaggagatggaagaactcattacgctgatggtcctcgtatacacgaatatttacataatatgaatcaaaaagttttcaaacctaaaaatatagttactgtaggtgaaatgtcatctactacacctgaagagtgtatcaactatactagagaaaatcgagaagaactatctatggtttttagcttccatcatatgaaaacagattataaaggaggcgcaaaatggactaatgaaatgttctctctggataaattaaaaaaagcacaatctgactttcaatataaaatgtatgaaggaaagggatggaatgctctattttactctaatcacgaccaacctagagctttatctcgatttggagatgatagattttttcgtcaagaaagtgctaagatgttagccataacactatttggtctacaaggtactacatacatatatcaaggtgaagaaataggtatgacaaatgcctactttactaaaatagatgaatatgatgatgctgaaagtaagaatgcatactatcatatgattaaatctggtattgatgaaaaggaggcattgcttatacttcaacaaaaatccagagataatgcccgtactcctatgcaatgggataatactatttataaggggttttctaatcataaaccgtggttaaaagttaataatgacaatattagtgtagaaaatgagcttaatgattctcgttcagtattttatacttatcaaagattaatcaaatatcgtaaacaatatgatatttttacagaaggtacttatagattgttagatgaaaatcataaaaatctatttgtttatgaaagagagtataaaaaccaaaatcttcttgttataagtaattttactcatgataatgtagtatataaattacctgaaacttatttgaataaattaaactacacaatacttgaaaccaattacactagagatataattgaaaataaaatggaaataaaaccttacgaaagtataatgatatattataaataaagttatttatataaaaattggtataacaccagggtgttataccaattttactaaattcaaaataacatttatagaatatctatagattacaataattatttgacttctacatcattatatttctttgaatatactttagtcatatagaaatatataggaactacaattatcatcccacctaatccccaaactatcttcataggttcatcaatacctgcttttatcagtaataatatacttataataactgcaaatattggtataattgctcctccaggtattctaaaatttacatctttatcagcatacttctttctcaatattagtacagctaaacatgtaggaatatattgaataaatctagatacaacacttatttgagataatgttgtgaatgaacccgaccatgctattagtaaagttcctatgacagatactataattgctatataaggagctccatttttattagtttttcttatagacttaggcattaatccttgttcaaccaaagcagcagcagaccttggtgtaaatatggatgatgcaatatttatacctccaacagatactatagttcctattgtaattatatacccacctataggacctagcatcttaatggcagcatctgcaacaggagtagctgaccctgccaagccattacccaacacccctatacttattcccagtataagcatatatattactgatactacaaacattaccattaccaatgctttaggtacatttttcttagggttctccatatcttttgctgcaacagctaaagattcaaatcctgtaaaagcataaaataaagttatagatactgctacaaaagctgatgacgcactttgacccttttgtattattacaaatggggtaaaattagaaccctttataaagaataatcctacagctataaataaaactattggtaataattttcctatagtcatgatattatttaagtgcttagattgtttcattcccataaaatttataatcccaagtcctacaactaatataccaattattatatttttaataagtggttctgctgcttgtggccatacagatgatagtgttacagcaaaaaaatttgccatagtagcccaagcaatcatactaactatccacttcataaatccaacttcaaatccaacaaaatctccaaatgcctcttttgcataaagataaggccctccatcagtatcaaaccaactacctgcttcagcaaaacataaagcaatagaaacagctaaaagcatacaaaaaactaatactaatatacttgctggacctatatctgtataagcatcaccaggtaacccgaatatacctgaccctattattgcattgattcctaatagtacaatactccaaaaacctaacttaatgcctttttccattgttattccccccaaagccaacttaatatatttatattttttatttagatgcttctttaactattgccataaatatttttttcatattatcataatctctagtcatcatttctggatgccattgtatccctattacaaactcacttccttccttttctatagcttcaattaaaccgtctttagatgtagctgaaacaatatatcctggtgctactttgttgacaactaagtgatgaaaactattaactaaaacttctttttctcctaatatttcatataattttgtcccctcctttatctgtactgtatgtgtaggtacattagatagatgttgctgattgtgtttaatataagcaccttcaattaaagataaatcttgatacaaactacctccttcagttacatttataatttgttctcctctacatatacctaaaactggttttttcatatctaaagcatgttttaataatttcatatcaaaactatctctctttggtgatattgcccccaacttattatgaggttcttctttccatatgagtggatttacatcttgtcccccagatagtataagcgcatctatattagatacctgctcctttataatctcatcatcatatacaatcggtacaatatatggtatagctttacacataactactgattgtatataatcattatttacataagccctttcatagccaggaaacattcctccttcatcaattagtaaattacctgatattcctattattggatatttctttttaaccaatttcttcaccccttaacttatttgtgaacaataaaaaatgctacttctcttaaagagcaagtagcataccaagattttatttatttgaacattataattcattttagaaatactttttttgaatacaagtaatataaataactttatttacttatattttattttaatcctgtttagtttgacttttttaaattgttttaagtacaactaataggtaaaataggcatttagattttcctttttatcaacctattaaatactgtttaatatattttttccccttctatttaattcacttccctttctaccagattcacatattatcaaatccagctcttttaacatattaagtattccccttacctcaccttctgttatactgtagcctaattcatttattgaattaacaataccatttctacctatatttttattaagattattggcattttttaaacactccattactaactttactttctctatagatgttctatcctttaatatgcttatttctttactaaaatcttcagttatatttaataagttatgaggtaaatcatttattaaaataacatcctcagaactcataatgttaatatacatagcagtattttttaattctcttatattacctggccattcatatgcattaataatgtcttgaacaccttgactaattgctctcttccttttcataaaatgctttaacataacttctatatcttcttttcgctctcttaaaggtggtatatttatgggcaatacatttatcctatagtataaatctgctctaaatctatctccttttatcatttctaataaatttttatttgtagccgcaattactctaacatctatatctattacattttctcctccaaccctcattacttgattctcttgtaatactctaagtaatttgctttgtaagtatataggcatgtctcctatttcatccaaaaatatagttccattgttagcctgttcaaataatccttttttacctccttttaaagctcctgtaaaagcaccttcttcatatccaaaaagttcactttcaagtaaattttctggcatagctgcacagtttatcgctataaatgactgactatgtcttggtgatgcattatgaatagactgagccataagttcttttcctgttccactttctcccgttataagaattgtataatcagattcagctattttcatacctaatttcttagttctttccatcttcgttgaaactgtttttatatcatcaaaagtatatctagcaacttgtcccttttctctaagcttctttgataggttttgctccaattttcttatataagttatttcttgaatacaaaaataatacccagtaacccttccaaaactctctatattatacttatttacgtttaagtacttattattaaattttataacttcatcatgtgccttactcaaactaaaaatctttttaatattctcattctctaattcatctatatttttccctataatattactttgaatatctagtatatcccttaaactattattgcaaataattatgtttcccttatctgataccattgccatacctaagtttgataaatttattatagaatttaattcatctgcttttatagtaagttctttgtatttagtatttattcctgaatataaactaattatttcatctgtatacttaattagcctctcagtaatttctttatcatccagtttgagttttgctattatttgaataaacgttgaactatcaatatacctatggcctaaatcaataacttcttctatatattttggaactaaacttgactctcctggcgttatagctatcttaatatttctatattcttcattgggattgtatggtataaaattcaaatggtttattcctatattgtataaattagatattgtttccaatacagtatgcttattatcgtttactactaatacatctatttcttctggcaatgaaaataacttatatatatccttttgctttatgctcctatttatagttattatctttgagacatcttctacatatttttttatttttaatactctatcatctatcattaccaatattatgtcatcttttattaattccttctctgttattttatttaaataataattttttatcattactttatctttaaatatcatttctagatttttatttaagaaacattctaatttagacaacccatcagttactactgctattgttttcatttgattactccttttaaaatatactctactcttttataatatacatctgattttcactttaatagcacaaaaaattgtacatttagtatactaacatattcctttattagttttatgtccctaaatatcatagttgcaatatctatcatatttcttaaacttctataaagcaaaaattgtgccaaattaataattttcttaattttattctaaagttcctcaatagtatttacagacttagcacttatagcttataagtctttatattattaatctatttttataggttaattgtacaaatcatatatcacttttacctattaaatgcattataaaaaagatggaataacgattcgtcactccaccttttttgtaataaaaaattgtatatataaacactatttactactcttctaagtacaaacagtatctacatactataacctttcaccattagattctattacttgtttataccagtcaaaactctttttcttaatcctagacaagtctccacttccatcatcatacttatccacgtatataaacccatatctcttggtcatctcaccagtagatgcacttactaaatctatacatccccatggagtatatccaaataaatcaacaccatcttctacagcttccttcatttgctctatatgtgcttttaaatactctatacgatagtcatcatttatcactccattagattcttttttatcataagctcctaaaccattttcaactaccatcataggtattctatatctatcataaatttcatttagtgcatatctaagcccttcagggtctatttgccatccccattcactagacttaagatatggatttttcactccacctaatatgttgccacttgtattatcttctttagaatcactacttacacatgtagacatataataactaaatgtataaaaatctacacaaccttcttttaaaatttctaaatctcctttttccatttttatttcaatattattttctccaaaatatctattcatataagttggatattcgccacgcacttgtacatctccacagaaataattcattactctactatctctttgagttttaactgcatcatctggattacaagtataaggatacattgttgcaaatatttgcatacatccaacttgataatttgaatctatttcatgagctaatttaacagccttagcacttgctacaaattgatgatgtaacccttgaaaacgaagttgaggtatatctacttggtttataaaatctgtagtcccttcatttaatattccttgtgataagtagcctcccataggcattgtagctgaatttatttcattaaatgtcagccaatattttacttttcctttatatcttttaaatattgtttcacagtaattcatatacaagtctattacctctcttgaaacccatccattgtatttctctgttattgcaaatggtatttcatagtgagatattgttattaatggttctatattatattttaaacattcatctatcacattttcataaaatttaagtcctgcttcatttggttctttctccattccagttggaaatattctagtccatgctattgaaaatctaaataccttaaatcccatttctgcaaataaagctatatcttctttgtatctgtgataaaaatctattgcttcatgacttggatagaatgttcctttttctataactctcgttattcttttacttactttttgagaacccccagtacacatatctgaacaagaaggacctttcccatctaaattccatgctccttcacattgatttgctgctgttgctccaccccataaaaaatcttttctaagtaccattactctacctccaataatttatttatagtaaatttattttaaaataaaaatacatatatctaatttttaattaataaaactctcttttaagctaaaacagttatcaattcctgactattatttacatgcttttgtgtattttctataatatccacataatcagaataattagtaacaactactggtgtttctaagcaatatccttcttttgatatgctttctatatcaaaagttattaatgtctgaccttttttaatcttatccccttgattaacaaaagatttgaaatgtttaccttccaactgaatagtatttaaccctatatgtatcaatagttcacaaccattatcagatataattcctattgcatgttttgttggaaataaagtcattatagtcccatcaaatggtgccactacttttccttctttaggtgttattgctacaccttttcccaatatacctgttgaaaacgctgcatcttgtatctgctccaaagcctttacttcaccttttattgggctatatactacttctcttttgtttttttctacaacgccttgcccattattatctttagaaatttctactatagaatcatctttccaaaaaaataatgttaaaacaaatcctactacaatagctactattattgctattatagttgcataaacacctttcatatctccagttgttggatttatataattaggtataccaaatattccaagtccacccattacataactttttacattcattatccccattacagctcctgccacagcaccacctacacaactatatatgaatggtgtttttcttggtaaagttattccatatattgcaggctctattacaccacatatccctgaaataactgcaggtatacacagctcttttatcttcttatcttttaatttaaagtacattgctgctactactgatgtttgtgcaaaagatggtacaaatgctcccactaatattgtgtcaaaccccatagtcataaggtttgacatagctattggtactaatccccaatgtagaccaaatattacaagcacttgccacaataaaccagttaatacaccacataaaattggtgaaaagttaaataaagctaaaaatccatttccaactatattagaagcataggtagctataggccctataaccataaatcccaatggtaaagaaactaataaaactgccattggtacaaagaaattctttactacatctggtattattttagcaaacactttctccaacttagctgctaataatactattataattactggtactactgttgaagtgtagttcattgctattactggtaatcctaagaaagttatatatactggtgattcaaatattgttccagtaaatagattgtataaaggttgacctatagatgctagagtatctaattgaatacctgaatagcataaaactgcacctataagcattccaataaatggttttaatttgaatttcttagcagctgtatatccaagaattattggcatatactggaacattgcatctccgattgcatttaacataatatatgcaccatcagtttctccatacaaacccaatgctgtaaatactgcattaaatccttttatcataccagcagcacacagaactcctaatattggttgaaaaactcctgatattatgtctataaacttattaagtaatccttttggcgcatctgaatctgaattatctattgtatctcctcctaatccagccaaatcgcacacaacttcataaacatctggaacatgattaccaataactacttggtattgacctgcacttttcattacagtaactataccatccattttttttagcacatcatcatttgctattgattcatcttttaatttaaaacgtagcctcgttatacagtgagataaactgctaatattatccttccctcctacattctcaatgatttcttttgatagttgttcatatcttctcattttttctcctccattttctttttgaaatatgaaggtttggccaacttaatgtcaccacccaatatatataaacctaattattaggatttatatctgacttaatacttttacttaccactctttcaacgtgaatagttaagtataatttttcctcatctgttaaatcgtagttgtattttttatgtataaattcatccaacttttctatgcatttataagcatttttatatttaacttttattacatttagtaaatcatcttcattattttcatgtaaattattactaacaattcgttctgcaaaatactttaagtgagtaataaatctatgataataaactgaatcttcatcaaatactattctgtaatggtatttaaccatatttgaaatttcttgtattatttgtgtaatctcatatatagtttttatactttgatccatttgtgcattaactatatgcagtgctataaatccagcttcatcttctgatagtctaatttcaaattttttttctatataatccaatgcttctaaccctattttaaattcactcttataaaatctttttatatcccaaagtaatacattttttacacttactccttcacgagctctttctattgcagtatacatatggtctgttaaagaaatataaatactatcatttaatcttttccctagtttttctttagcatataaaattatttcatctgataattccatatatcttataggaatatctgctattagttctttaaatttatcagatatatttgggtctgaaagtttgaatatcttatcaattttatcctttgatatatgctctcctgtacgttttttataagctaaacctctccccataactactatttccttatgattttcatcagttgtaataattacattattattgagtattttttcaataatcattgtgatgccccctttattagcattaagttaaaataaatcttttttaattatttagaatatttaaaatgtaatttattacataaaaaaaaacctatttattacacattaaatagactcccatgagtcctgagtaataaataggtttagcttgtatttaaacaatcactatccgtttgtattttattttaattattatttattatatgttagcaaatttattttttagtgtcaactttttctcaatattttaattctaaataaattatataaattgcatctgcaaagtactatttttataaataaacaaaataaaaaaggtattacttgctttaagtaatacccatttatttttaatttaagtggtttttcttaatctcatcaagtagtccatcttctaaataaatttctaatgcacatcctaccattgcctttactgctttgtgaagtttatcataagcttcctcagaatttgcataatttagaaattctttttcatgaacatataccattggacttatatctaaggctatttctgtatacatagtagggcaaacttgacttacattacctatatctgtagaacctactggaccatctttaccttctaatatatctgttatacctgactcaatcaaattattctttgttatcttttgaagtactttgttatttattatgttgtcaaaagaattttcaaagtatctataagaaagcttagctcctgtcattaactctgcaccttttgcacagtttataacttttttagtcacttcatctaaataacttctttcagcagctcttacaaaaaacttacaagctgctttttctggaactatatttggagcctctcctccatttgaaactattccatgtattctaacatctgattttacatgttgtcttagtgcatttatcccagcaaaagtaagttgtactgcatctagtgcattaactcccatatgagggtgactagctgcatgtgctgataccccttcaaaactaaactctaatgaatctattgccaaagccttacagtttatattattaaaagcttctatatgcatttgataacttacatcaacatcatcaaaagctcctgccttaactaaatcacattttcctcctgttgtttcttcagctggtgttcctattagtacaatttttcctttaaaattttcttttaacttacttaatactatacaagctcctagtgtagatgctgcaatccagttatgcccacaagcatgagctggttctttattgtctccatatccaggaagtgcatcatactcagctaaaaatgctatggtaggtccatcattatctcctaattcagctctaaaagcagtctccatattacaatatggataaactgtatcaaatccatattccttcattttctctactaagtattttgatgatatgtattcttcttcccctaattctggattgttaaatataaaattacaaacttcttcaatttcttttccaagttcattctctatctcataagctctcttctttatactctctatcataacttacctcccactagaatcctagatataatcctattgtcaaaaataccattacaagaattgttaatactaccattaaaggaattacgaatctaacccactttgaccaaggaatattggctactgctagtgctcccattaaaacacctgatgtaggtgttattaagttagttacacctataccaaattgataagctgtaactatcatttgtcttgatacatctactaagtcgccaagtggtgcaagtacaggtattgtaagtgatgcaagccctgatgctgatggtattaaaaatgctattaatccttctattaagaaagttaaatttataaatatagtttttggtaatccatttaataaatttgctgcagaatttaaaattgtatctattataaatccattttctgctattattacgattccacgtgcaaatgctatacataaccctgctgtaattaaatctcctgctccacttataaatgaattaactatctcatcttgtttaagccctgatgctattcctgatattatacctatagctgtaaatatcattgcaatttcagttatgtaccactctagtcttaaaactccatatatcataatcgccatacctattgtgaaaatggctattaccatggcttctctttttgtaaattcctttatatttgtatcactattaaccattgattcttgatttagtgatatatcgtgtactaaagattttttagggtcttttttaactttattggcatacatcataacaaatcctatagatatagccatatatattataaacataacaactctaaactctattccagaacctggtactatttgtgataatgcttgtgctattcctacagagaaaggattcgtagtagctgctccaaatccagctgttgctcctataaatactgtggccactgctgtcaatgaatcatatcccatactggtcataagtggaataaatatcatataaaaaggtagtgtctcttcactcattccaaacgtcgtcccacctagtccaaatagaatcattgaaatcggtattattaaaaattgaaacttcttcattttatttacagtatgagctataacagcttctatagcccctgttttattaactatcccaaaagctcctccaactattaaaacaaatccaactacttcagctgcatctataaatccgtttataggtgctgtaaatacatcagtaattccttgtggatttgatggtgctttttcataagttccagctacaacaactgaccttccgtctatatctactctttcaaaatttccacttggcactatccaagtaagaattgccattaacactattagcgaaaatattattgtaagtgtctgtggcatagtaaactttttcttttttaaactgctcatttttaatctccccactttttaaattaaatattttattattgcatccctttatcctattttgtatagatgtaaaaaagctcaacatggatacatgttgagctaaatgtgctaaatacaacatacctgcatcttccctttatcttgtttaagatagctctccatcaaaattcgggataattttgatgacagtactgtacctattaaatacagtcccagcactagctttggacactagcacttcggcacttactccttttatattgcctcattggtttccaacctcttcaatattaatcttagtaaatgcaacctctacctcaatctgttcgttagatgaggtaattcttattaatttttattgattcaaagtaattgtagcataatatgtcgagattgtaaatattttcagtataataattcttactttatgatgtcattccatttttcacaaataattttttctccatataatttaaatactgtagtatattttaaatacacacaaactttccacaaatttttaattattataatacctttataataaaaaataaaagccatgtaaacttatcaatttacacagctttatatacattaatctactccaagtacagctttaagctttgatgctattgtaataactcgtggaccaaatataacttgaactgagtttttctttttaacaactccacttgcacccaattcatttacccagaaaccatcttcatagaatccatcaattgaatttagctctaccctaagtctagttgcacagtttgtaacattttttatattattacttcctcctaaaccttctattatagaatgtacaagctttgtatctttatcatctacttcctcttctactgcattgttgtatgctgttttaccagcatctacagattgtctttctctatattctttcttactataaagcttaacttcttctgaacttcttcctggtgtttttatatcaaacttcttaattgcccatgtaaatattatataagtaactataaaaaatattggtatcaaaaataataatggtaacgcatccactttttgtggttgtaataaattaggaaacatatttctaaatgattctcccattatagaaacattaaacatttctgtaaatacatacgtcaatcctgccagtggtacatatgctacaaaatacaataatggtgcaacaaataggaatgtatactctattggttccgttacccctaccaacatggctgttactattgctggtatcaatatacttattgcttttttcttattagcattatcagccaacttatacatagctaaagctgctgctggtaatattgcaaaatgtattaataaacgacctgttgtgaagttacgagttatataagatagtgtatctgggtctcccatttgagctaatcttatattattaacaccctcgtaaattgctccacctacttccattgttccacctactcttgtatattctatagggaatgcaattaagtgatgtataccaaatggtaataatgctttatccattgctccaaaagtaaatgttcctaataatccactagaacctatccaattaccaagtttagataatgccaaccctactggtggccatataaagtacattgctgtacccaatactattgatgctataaacatcataatcattgaaaatcttggacctgagaaaaaagataatgcactaggaagttctatgtcaacaaatttgttatgtactgcactagctacaaatccagctattatagctccaaatatactacaatcatatgaaaagattcctaagaaagaaccatataaagaacttcgactatatgcttctgcctctcctaatccagatgccataaacgcttctgctgtaactgtatctgaatttataccatttgatgctaacaatgtacttataactgtgtgcattcctataaataaaacaattcctcctaatgcaccccatcctttttcctttttagataatccaaaagctatacctgtaacaaagaatattggtaagtatctcattaccataaatcctaaatcgtttattactttaaagaatacatttataaatgacccttcttttattagtccgctaagccctaatgcagaaacgttttccatatttgcaaaagctgaccctaatcctataaatactcctgctacaacaagtaatataacaggtatcatcattgctccagaaagtacttgtaatttatccttcatagtattatttcctccatttttattgaaatgccaggctatataatgcatatatatatacttctattgctttgtataatgtatctatacttatattttcatttgcctgatgtgaatttggattatctccctctattgtgggtccaaatgcaactccattttttaacactcttgcataagatgcagctccttttgtaaaaagttcggcttcttttccaaaaccttgtttatatgcacttgataatttatttattaattcactatctggttttacatacagtaattttaaatccttatatatatcaactattaaattttcttttttcccaatttcattaattctattagttataaactcccaacttatacccttaggatatctaaagtctattttcatattcaattcatttttctctaagaagatactcattatacatattgtagaaactcccatatctacatcttctttatatatccctaatttttttccatgattatcatctgtaaagtatgaatttaaaatatcccttattataacgcctttatcatttagctttttaattttctctaaatcttttgctaaactaaatgcacagttatatgacctgtgtggatttctcgataaagccctttctcctgtatatcttactaatactttaccttcttctagttcttctatctctgtataataagctaatgattctactaaatctttcttatcatcagttttaaaaacagcctcaattttgtcacatacaaatccatcttctttgtttgactttatatcaactaaattgtgatttctaaatttatctttatctattttctttcttagattgaagtataaaataccattttctccatttactattgggaagtttccatctggagaaaatgcaaattttggctgttcattgacactaaagtaatgctccatacattcccaagtcgtctcttcagctccacccactatcaatctaatctttctcttcggcttttcattaagttctcttaagaaaagtaatgcatataaaatccctatcaaaggtcctttgttatcattaactcctctaccataaagatagttatctttttgacatactttaaaaggtttactcttccaaagttctttattatatattggcaccacatctatatgattaagcacccctactacttcttctccttctccatattctatatgaattgcatatccatcaaagtcttttacaacaaaatctttgtcttttgctatttgaataagcttatcgaaggcatttcttatttctatcccaaatggttgatttatatctgttgtactttcatctctaattgaaggtatttcaactaaacttctaatatcctttatgatattttcttgattggattttaaataatcaataattagttctttgtttactatcatcttaattatttatcacccctttatattaattttacaaagcatttcagttcatatctacattataaattttgaatattattttttcaatatttcaaatacttctctaaattaccataatgatacggtaaacaatcaacagattatgacaaaatcatactatacctattactaatattttaacttatctattacgtcttttttaatgtaattttattccaaaaatagatataaaaagatgtagccttagctacatctttttatatctattcaacttccattattatgctattaatatctacatttccaggttctatcctatcttttactgttctcttaacagaatcagcatcatccattataactacaggagttattatatttaaatcatttgacgttataaaatctaaatctacttccattattaaatctttagcttttaccttatctcctgcctttaccttaacatcaaacggctttccttctagtgacattgtctctaaacctacatgtattaatatatttgtattatcattactcttaatcattattgcatgctttgtatcaaatacattgactatttcaccatcaacaggagaatataacttaccttcatttggtattattgctactccatctcccatcatcttttgggcaaaaactgcatctggaacatcttctaagttcactaaatttcccttaaaagggctatatattttctcaatcttattttcttttttcttaaatatattaaacataacacactctccatattataaaattttatgataatatttttcttaaagcttttgctacaccatcatttacattagtatcagttacaaaatctgccatagattttacttcatctgtagcatttcccatagcaataccaagacctgcaaatttaatcatggatatatcattttcattatcacctatacaaataacttctttgctatctatacctaatatatcacaaaattttttaactgcaataccttttgaagtacctttactcataacttcaaaatttatctttccagaacttactacttctaaatcttcttgttttttaaattcttcctttgcttctctcaaagaatctacgttttctgagaaaagtatacattttaaaatttcattatcagctttttctaataaagtttcacaacttgcattttctattatttcaattctgtcttcttctttatttttactatttattaatctatatggatgttcttcacctatttcattgttggatataactattttacagcctttaaaatgtttgtttaaattatacttttcacctattgtatagattttctttatagcttctttgctcaaaaccttcttatactcatatcccattaatttaaaatatgtcccattagttgatataatatatatatcatcccctaaaacacttgtaaaatatttcatagcattataaggtcttcccgtaactaaggctaccttgatacccttttccatagcttcttttagtgctttaatattttcttctgatacttcaaatcctttccccatcaaagtaccatccatatcagtacaaattaatttatatcgcatttgtatcacatcctagtaagatttttctaatatttcaacaaggtcttctttctttccaaaaggtaaaaatcctaaaactggacagcttgttatttgttctaattgttcctttgttacattaaactcagacatttttgtcttaagtcccactctctttaaaaaactttctatttcatttcctaaagttttagctgcttcatcatcttccactttttctaattcttggtttagcattctcgctactttggcaaatttctctatattatccttatagaacttttctgcaaattttgggaacactatagccaaagcctcaccatgaggaatatgtgtaactcctcctattatttcacttagtggatgtggtgctgctgctccagcatttgccagtgaacttcctcctaatgtatctgctactgctaactttgttctgtattctatattatttttatcttccattactttaggtagatagttaatgactaattccatagatttttcagacattatctctgtaaagtcattagcatttggatttatataactttcaaatgcatgagtaaaagcatcaaatgctgttgatgcagtaattctctctggcagagttaacataagctctgggtcaactatacattcttttgagaaacaattttgatgaaatattgtatttttctcgcttcctctcgatattactgctgcttgtgtaacttggcttcctgttccagaagtagttgatacagctattaatggtaattctttttcacttaccttatcgtatattttaaatggatttgtatatgtactaaacatataatcccaatctattttttctaaaccaaaagtcaatgctaatacttttgcagtatctatacttgaacctcctccaacagctaaaacaacatctacagattcttttttagctaattcgaacccttcatttattaattctacagttgggtttggctctactctatcaaagtgtacaacttctatacctttttctattaaattcaatgtaactcttttatataacttgtctaatggctctacatttggagtagtaactaacaaacatttctttccatattttcctattattctaggtagttcacttaaagttccttgtccaaaatttattcttgatggttgataaaagttaatcatatttttcctcccttaaattattgacttcatattcaaattatacatatcataggatttttaaggcaataccttcactgttaactcttatttactaaagcttatggcaattattagacaataaatgttttattattaccatatcattatgtaaattttattaagtacccatgttataattttataatcaatcttattgtataattgacttaataataaaaatagagtatatacacttttttatgacaaatagcttaaaggagaattaaattatgaaatatttgatagacagtgctaatcttgatgaaattcaaaagtgtttaaagtatggatttaagggaataacagctaatccatctatgtatcttaaagagaaggtaaacttccatgaatttattgagacatgtactaatttaaatccagaaatattaactgctgaagtcattggaaataatttatacgaattaattaattcatgtgataagatattaaatataaataaaaacactataataaaaataaatttctctgaagttggcttagaacttataaacatattaaatagtaaaggtgtaaaaactgcatgtaccttgattttcaatgtaaatcaagcatcattagctataaatgcaggtgctgattacctattcccttttataggtagaaatgatgaaaatgggaatgatggtataaaaaaccttacagaaatatgtaaccttatatcaataaatggatataatactaaagttgttgcagcttctattaaaaatgtattccacttaactcaagcatctctttgtggatgtgattatgcagctgtaacatatgatttatttaaaaaagcttcttttaaccagcttacagtagatggtgccaatacttttgaaagagattggtccaaggttaataaatagtaactaagatttaggagggtttgcattgaacaaaagattattagatattgctgaattattactcaacagctcagactatattactgtagatactattgccgaagaattaaaagttagtaataaaactattcgtaatgaccttgttattttagatgaatggcttttagagtttaatttatccctagataaaaaaactggttcaggggttattattctaggtaatgaagatataaaacttaaagttattagagatatcaatgataaatcaaattgtatatatgcatactctcctgaagatagaaaaaggtatattctaagtaaattatttattaaaaattctaagtttaggattcgtgatatttgcaatgaactacatgttagtagagctactgttcataaagacttggtagttattcaaaattttttgcaaaactttaaagtgactctagttagaaaaaccaataatggagtatatttagagggaaaagagaaagatattcgaaaagcagtttttgaacttgctactgttaataaaagttatactgaacttaaagaaatattattctcgaactctaatgaatgcaaagataccccatcaacaaaaatatttaaggagctatttaactatgattttgagaaattatctcaaatcactctacacaccttacaagtagaaaaaagtaaccttagtgatgagtattatataaacttcttaatacatatagctatatgtattaagagaatttcaattaaaagatatattaacttatctgaaggtttttttagagaattattagaacatgaatactttgaaaaatcaaaaattttatgtgctaacctaagtgaagcttttgacgtagaatttattgatgaagaggtctgttatatacttcttcatatagaaggattacttaaatcaataaagaaaactactactcttgaacctcttaaaaatgaagaaattacagagtataatctatctgaagcaatagctgttcattggggaagtatactaaatttaaacttaaaggatgatttaatattaataaagtctcttgctaatcaccttaaatcagttctacacagaataaactatggatttactattacaaatcccatattaaatgatataaagagaacatttccttatacttataaggctgctaaagagtctaatactgttatcaaacagttgatgaattatgaagtcaatgatgacgaaataggatatcttgctttatatttaatatcagcaatagatagaagcaaatctcccctaaatactattttaatatgtcactgtagtgatggtgtatctaatttattagtccaaaagttaagttttgaatttaatcagattaatatagttaaatctatacctctatcttctatttcatttacgaactttgatgatgtggacttaatactaaccactgctcctgtagactttgaacataatgctgaactgataaatataaatgctcttttaagtaagaatgatatttccagacttagtacaattataaaaaaactatattctgaaaaaaataaaatattatcttataaataaacaaaaataggcttgtctcaacatagagataaacctatttttcattgtccaaatgataaaaatatatttgatttcatagaaaaagtgcctcatgaactaaaaaattcattttgagacaccttcattttttatatttaatctttttatttaagcttttatattttttaaacttttatattttttaaacttttatatttaaagtaaattttattatttttattgagcgcaagcattatttatattattaatttcttcagtattcttaccaaactttgtagttacaaatcctattgtttttattatgagtaataaggatatcaatgaatatatagatatcataaaattcttacttattattccagatgctactattataaatccatctagcataaataatataactggcaacttcagaaacttaattaccttattaataagcattgcaactaaatcagttccaccagtactacagccccttattattgctatccctatagcagttcctaccaataacccacctatcactcctgctactaatagattgtcagttatgtgagtttgtggtattacttttaagaataatggacccataagagttatatataatgtttttattccaaaacctttccctaaaaataataatcccattactaaaagtggcatagatattcctaatgatatattctcaacaggcattgataagaatgtgctaagtacgactgataatcctgttatccctcctggagctaatgtatgttctgcaaagaaaaaattaactgctaatgccattaaaaatgctgatattgttatcagtaaataatcttttatcatttcttttttcatttaataacctcctatgattatattgtttcagtataaaaaatcaattaaattagtctagcttcctgtagtttttcataaaattaatgcttccttaaaacattaagaaagcatctcttttatcatagtttattatcttattctaaaccaaactttgtagctgcttcatctatagcttttctacaattcttaacacctgctgttataccatctttatccttgaatattgctgaagataatattacaacgtctggattacattctattaatggctccatattgtctgctcttagtccaccatctattgctaattcacacttaggattcttttcgtctatcatttttctagctctttttactaaatcaacagcactctttctccatccccagttatcttttccatcagtttcatcaacaccatgaacgactatttgcaatctatctatatcatatatagcttcatcaacaaaacatagtggtgtgtaacatccaattgttaatcctactttcataccaaattctctacagtaatttattatgtatgcaagaggagcgcctaaaaaatgttctgctggtattatcaacaagttacatcctgctgctgctattttttctataaataatctatcacaatctcttgtgtatatatggcattctattggtttatctgtcactggtcttattgcttctattatttgatgaccacccataagttgcatattttttaagtcatgcatatctgctgcatctgaatgtacgtagtctacacctgcatccattgcttctttaactacggctgatatatgaccgtaatttacatgtgctaatcctgctgctatttttatgtgtttcatatttgtatacctccatattttactttaattagtattaaatattagtttttgatattttttaatccagtattacttttatttagcattacttttattgctgtatatatttcttttatgaacttattctgcttttgttaactgtgaacttattttgctttgtaaattaatattacactgatatattttttttcacaacactttgactactccttaaaagtacctttatattgtggtaaattatagacattaattgtatataaaaagttagttttttaccacattcttatggcatttattgtctatactaactcaattgatatagctagttcatttaatatataatcagactataaatataaatttactcgataaaaagtaccattcataacaatattaatgaaagggagatgtaaaatgagaaactgtattattgcccaatctggaggccctacagctgttatcaatgcttctgcagttggtatttatgaaaaaaatttagaaactaaatactttgataaagtatattttggtatcaatgggattgaaggtatattaaacaaaaatataatagattcagactccttaaacaaagataatgtattaaatttaaagcaaacaccttcgtctggtcttggttcttgtagatacaaactggctgattataaaataaattcttatgattatgatagagttataaatatactagatgaatatgaaatagatacattattttatataggcggaaatgattctatggacacagtgatgaaattttctcaatactgcaaaaacactacttgtaaaataaaatttatagggattcctaaaacaatagataatgatttattaggaactgacaactgtcctggatttggttctgctgcaaagcttatttctacactaataatggaaacatacttagatttttctatatacaaaaataatggtatatttatagtagaaaccatgggtagagatactggatggttagcagcttcttcttcactagctagacttaatgatactccacttgttgatttaatataccttccagaaattgatttctatgaagataagtttatagaagatgttagaaaaatatttaaagaaaaaaataaggcttatatagttgcatcagaaggtataagggataaatacgggaactttatatgcgaacaaaaaacttctgctcatgataaatttggtcattcccaattaggtggagtaagcaactatctaaagaatcttatagtatcatcatcaattacaacaagagtaaaaaccttagaacttggtgtaatacaaagatgtgctatgcatttagcttcagatactgatttaaaacaagcagctgaagttggtgcatatgggatagaactatctaaaaaaggatatacaggagttatggctatcattaatagaacatgcaataatccttataagtatgaagttagtcatactgatatttctaaaatagctaacaagacaaaatattttcctaaagagtggataaatgaagaatgtaattatataactgatgaagccctaaattatctatatccacttattcaaggtaaaccagatatcaaatataaaaatggactaccttatttttcaattatttactaggaaattattataatttgatatacactcaattctatcgctcttaaatacctaagtggctgttaaataaaattataaattgttatatgacagtcacttaatcgtttaattatttaactgtttagttttttaattttttaatcttttttaatactaatacgatttgttgtaataatatctcacacccattttcattttggatagattataattagttagacaataaatattttgtcatgatattattatatatagtgatacaaatagaaatacttttatcatgactagaaaaacaaagattacacaaaggatttaaaaatcaaacaacttcaattaaaataaatggttaaaataacttctaaatcaactacataaacaataaaagaacataaagtagttaaatctacaattataaaattagtaagactataataacttaaataaaattaaagttaacaaagactattaaagttagcaaatattcctctacctaaataattgctttttataaagagttatttattttaatttattttaattgaaatacgattttaactagaacaatagattaatgtaatatttaatataaaataattataataattgaaaaggaagtaatctatgatgaaaatagcagtcataacaaccgaatttttaaaagagtttgtagataattctataaaaaagttaaatattaatgcagaaattgaaatatatatctatagagatttttctcatgttggagatttatatttagaaatagaagataggtttgatggatttgcagttagtggccccatccccaaaaaagctattacaaaaaaggctggaactattaaaaaacctctagttgattaaaaaatagctacgcacacttgtgactttagtcatgagttagtagctaaaatagtcagcatatagggaaacctatatgtagagataggatagaacctatccaatactacttgaattgctggaaacccctaaagctaaccaaactaaaacataaggatgaaataaacctaagtgtgaaagttacgaaagtagaaaaaattggttagatggtataaggttaaatcctaagtactttaaaatgggcaatcagcaggtaagctccgaataggagaaacttcaacgactattcctcttgagggaagtacactacaagctattggtagtggaagtgggtagaccttaacggataatgccgaaggataagatatagtctgtgcttacatgaaagtgtaagaagttcataagagaactgcataggtagtagcgaacttatgtgaacgacaacctcaaaaatgataaaagttaagaatttacggttcttatatatgttatttaaaaataaatataaaaaaccttcaaaatacttgttttaagtaattgcatattttaatattatgataggtgatgaaaaatggaagttactcatggtagaggatatgcatataatatgtcaaatatagatctccagtattatggggagacatttttggaatcctagttatttcgttgctactgtatcagaaaatacagaggagcagataagaaaatatattaataatcagaaaaaacaagtaaagtgaggtgatagtagtggaaaaagcttataagtttagaatgtatccaaataaaaaacagcaagagttaattaacaaaacttttggatgttgtagatttgtatataataagtatcttgctaaaagaatagaagtttataaaaacgataaagaaacttttacttataaacagtgtagttctgatttaaccaatttaaaaaaagaattaaagtggcttaaggaacctgacaaattttcactacaaaacgccttaagagatttagataatgcatataaaaaattctttaaagaaaaagtaggatttcctaaatttaaatcaaagaaaattaatagattttcatataaaactaactttacaaatggaaacattatgtattgtggtcaacatataaaactacctaaacttggtatggttaaggtaagggataaacaagtacctaaaggtagaatacttaatgctactatatctaaagaaccaagtggtagatattatgtatcattatgctgtactgatgtagatattggagtatttgaaaatactaataatcagataggtttagatttaggaattaaagaattttgtatctcaagttgtggagaatttatagaaaatcctaagtatcttaagaagtcattaaacaaacttgctaaattacaaagagaattatcgagaaaaacaatcggtagtttaaatagaaataaagcaagattaaaagttgcgagacttcaagaacatatagctaatcaaagaaatgattttctacaaaaattatctactaaattaataaaagagaatgatattatttgcatagaagatttacaagtaaagaatatgattaaaaatcgtagactatctcgcttaatttctgatgtatcatggtcagagtttattcgtcaattagaatacaaggctaattggcatggtagaaaaattgtaaaagtaggtaaattctttgcaagttcacaaatatgcaataaatgtgggtataaaaacgaggaagtgaaggacttaaatataagagaatggatttgtcctagttgtaatgaaactcacgatagagatataaatgcaagtataaatatattaaaagaaggattaagactaataacaattcaaaataaataacttatgtaagaaccgtaggaactacggggatggcctgtgaagaattagtaagacatattttagtatgcaaaattctatgaagcaggaaccctgtgactttagtcatgggaggttcagtttggtactgacttacaaagttactatgatatgtttctaaagcttatctttaaatataatacattagatttttctagagcatactttgacttaacagactgggcagataatccaaaagatatatcatattatttatcaaatggcacatttggagacttaatggatagtattgatgaaaatgcatctaaaatgagtttatctgacatagcaaaacttgaaaaaaagattgcaaaaaaacatattaatctatggaatgaagggaaaatcgatttttctactactcgttttagtagtattgttcctatgttacaaaatgcaggagtaaactttcatttcatataccctgatatagatttattaaaaaatacttttaataacttaataaaagatattcatttacatagaatgaagggaaatcaaccaagtgtaatatatataacagttaaagatacaaattatgatgactctactctagaccaagtttataaaatattaaatagtattaaaaaagataaattaaccgattttataattgaaaaaaatagtaattcttttaaaattttcactaaatgtgaaacgattaaatcattaactaaaaattttactgcatgttatataaaagaatctattgaaaatagtacaaatattaaagtatgtgttggatatggaattggtaatgatataaagcaagctatgtctagtgccataagtgctaataaggaatctaaaataaatcctttaaattacagtttcttagtcaacgaaaattatgagacaataggacctttactgtgtgataagttacttactgtttcaaataaagtaactccacatataaatacaattgccaaaagttctaaattgtctactcttactattcaaaagattatatctgttactgaaattctacaaagagatgaagttactcctaaggaattatcttcatgtttaaatgtaacagttagaactgctaatagatttctaagtagtctcttaaagtctggaaacgctactatattatatgaaaaacaaaactcaacaaaaggtagacctgaaagggtatacaaattatttatatcagaaaataaatattaaaatccaaaatgcataaaaatattttatcatctaatattaagtaaaattatatatgactttctaaaaggtatatctttgcatctttttaagatataccttttatgatatttaataatattttatgttattatctactaaaattattttctaaccattttactgcacaatgagcaaataaagctgaaccataaactaatccctcttcattaaaaattgctttaggattatgcataccaaaattatatccctgactaatacttcccattccaatccataaaaatactcctggaacccttagtaaaatctctgaaaaatcttctgaacccattgcagatggaaagtctattacattctcatttcctataatttctttaacataagatacaatctcatctcctacatccaaatcatttataactgcgggagtccccattttaaattccactttagcatttcctccaaatgatttagctattcctgtagatatttcaataattctattttttaatttttctctaacaaattggtcaaatgttcttaaagttcctgacatagatgctttatttggtatagcatttggtacgtttcctgcattaaacataccaatagttaaaactacaggctctttctgaggtttttctcttgaaagtatagtgtttaatgctatttgtatatgcgacattatgtttattgggtccactccaaattcagggcttgctccatgagttgcttttccttctactgttatttcaaatatatccgcagatgccatagctggaccacgtgaataagctacttgacctgtgttaagaaatttacccaccatactgtgaaatgccatagctgcatcgacctgaggattttctaatataccatcatcaatcattgattttgcacctctggtactctcttcatctggttcaaatacaaactttactctacctttaagtaagtgcttattatccataagtattttagctgctcctaagagcattgctgtgtgattatcgtgtccacaactatgagatgcatctttattcttacttttaaaaggtaaatccgtctcctccataataggaagtgcatccatatctgcccttaataataaggtctttccaccattttcactgtctaaaacagctactattccattattagacgtcaatttcggagaatatcccattttttctaaagtactggtaacaaaggttactgttttcggtagattgcaaccaatttcgggattttcatgtaaatatcttctccatctaataatttccccttctattgactgcgcttctttaaaaaaatttttcatattccttcctcctaatcagatagtcagcaaaatctcactttcttttagtaatgaaatgatgctgatataaaaattataattttatatattaaacttcatgtctttttaaggagttggaatatcatctggaataggacatttatatgttttaccattcatagatttatcaaactcttcttttgcctttttagctatctctggattatttaatattttggctccaaacatagccatgatttttgatgcatatatcatacctttttctcctatagaacttcctgcacaagatgtaaactgccagctatgacctggtgcacctagattcgtacaccctgtaaaaaagtatgctgtcggaactatatgcattacatctccaatatcagtagaaccataactattaaagtttgtaacatttcctccaccataatatagatgagttccttctggcaaattatatttacttatcatagccttatattgttgtgggctttgtctatctaattcagctgcaaaatccaattcctctcgagtccaaggctcttgtttaatctcattcatacattctgatacaagatttgctaaaacatgattatttaaagtattataacaacctcctaaaaactctacttcaacttcagtttcagtcatcattgcagctccttttgctacctttacaagtctttcatatgtactttctacagcttctctacttaaagctcttgtataataccatactgatgctttatcaggaactatgttgggtgctactcctccatctgtaattgtataatgaatccttacatcagaagtaacatgttctctcaaataattagctcccacattagtaagttccacagcatctagtgcacttcttccattttgagggtctgagcctgcatgtgcagtctttcccttaaagtgaaattttacagagttaacagctgttgaagtaccaattgtagcttcactaattttatttggatgaaaatttatagctaagtctaacccttcaaatgctccacctctagccataaatcctttacctgttaattgttcttctcctggacatgcataaaatactatagtcccacttaagttattttctagcatctctcttttaagtcctactactgcccctacatgtgctgtacataataaattatgcccacatccatgaccatatgcactcaattcaaatgcttcttgctttgttgaaactttttgatttaaaccaggtaatgcatcaaattctcccataaaacctataactggtttacctgaaccaaaactagctctaatagccgtggctaaacctcctacacctacttccacatcaaatccttcacttcttagaaagtttgctgtattttcacatgctttaaattctttaaatgctttttctgggttttcccatattttcttacttaaatcatcaagtttgaatctttttttatctatctcatttatagatatacttcctatcatttcttattcctcctataagtatatttactatcaaccaaatataattggacctattatactagcaaatgccactgatgcaatggttacagtaacaaatcctcctataatcatctttggtaataaataatctgttgccctttgtttttcttcttcagttccttccatagcatcaataccttcgttggaaattatctgtgttgcaggataagctagcatacaagttacaccaattgcagctgacattcttggagaatatcccaatagttttcctacaattgcagtaaataatattataaatacagaacctacaacaagtattcctatagttggaacaatcatcccaaacaatgctgttggagttaccttagcaagtcctccaggtaacatcaacatacaaccaaacattataattccattagattgagatttatctaaaattcctttttctaaaaaacctattcgtgtaaaaatcaaccctactaacaaacatgctatattaggatttaaataatagtttgcaggggtaaatcctggtattaaagtagccaatcctacaaaattaccaatcatagcaacaaatgaaagctttgcaagatacactagagtagatgattttttacctaaatcttctttaaaaattctcatacttggaagtctaaaattactttttgactcatctttcaaaaaatccccgttatctcttttaaattttaattctttatttatacaatatgtagttatcggaatgccaaagaacttttgaaatgataatactagaattacaaatgcagcaagttcaggtctatttgcagcttctgcaacagttgttacgataataccggcaacagtagaacctgctattggaggtgctgctattaaagcatactctctaccaaataacatactacccactgttaaacagccaacccctattcctacaatacctactaatgcaattacaaccgttttccattcatgacataagtcttcaagatttataagtgttcctaagttagttattaataaagctataccaaagttgctcattgcagctaatatccctgatgctcctgtaatgtcttttggtaaaacatttgtccaaaatcctagtaaaaatataatacatacaaataacaatgttgaaattgcaccttttgttttcttagataaaaactcactaaaagcataaatcattacacatacagtaaagcaagtaagtggattccaaaaattttccattgttgtttcctcctaaatataataattttttatcaataaaacaataattataaaatgtatattatgcagttattcttaactacatatggtatagcttgatattttttgatgatattatatacgtcttaaattattcctaaaatatctaaataaatataactagagttaactctctaaatattaactataattatcaacttactagatttctttttgatttttactttctacataattttacaagttagaattgtacttcaactactttctatcttagtatacatgttggaagacttatatttatttaaatattagatatagaatacatttttacaaacgtcttaaattattcttaaaatatctaaaacgaaataataatataaccattaaaccaatattatcagaatatactccactttaagtcttctttatataaaaattttatctactagtgcatcccctcctttgtaaattagactatttctaagcgaatttagatatcttattcctatgaactattactagaaacaaaaattatttattatattaaatcaatgataagcatactttaaaattctttctatacaagtatgatttatcatataatgacatctataccttcatctttatagtagtcctaaattattcttaaattgacaataaaaataatttcactatttgtaaaaatacttgtttttatattgtcaaactattctcaatatagattataatttcaaatcttttttttgtcaatatattctgacatttttctagaaaatttataaagttatatagtgagtaaatcatactatttttatataatgagtaaattatactatgaatatgtctaaatatttacttaagtataaacataaaaaatgtgtattctcctttttatagtaattttagttgccattacttttaataagaatacacactttactttaaagaccctatactctattttaaatgctttactagacactaattaacattagttcctaacttctatttatcttattactaccctactactatatccgtagaaaaatctaaaacttctccattagattttattacttctttgtaccaatcaaatgattttttcttatatctcttaaaacttcctttgccttcatcatctaagtcaacatatataaatccatatctcttactcatctgacctgtagttgcactgactaaatcaattggtccccacatcaaatatccaaaacattcaacattatcctcttcaattgcagacttcatttgagatagatgcttacttaaatattcaattctataatcatcatttatagttccatcttcttcgattttatcatatgcccctaaaccattttctgtaattaagataggtaattgatactttctgtaaatatagttcaaggtaaatcttaaacctatagggtctattgcccatccccacttactttgttccaaatatggattttgaatcccaccaaataaagatttatcacctgataaattttcttttggagtagatacacttgaaaaataataattaagacctataaaatctaacttaccttctttaaatgcttttttgtcttcatcagtcacttcaatagttatattatttttttcatattcttttaatttatattggggaaacttcccattgcacattgcatcaatttgataataatcacgatcattatctaaaaatgcatttaacacattactaggattacaattgtatggataaattggatttagtccaaatacacatccaactttattgttgggattgatttctctagccaactttgcaacctttacacccgccaaagtcatattataccctacatttgccaatgtttgaaccttattttctatttcactatacttaatacctgctatcatataagtaaaaatatccgagtgctctgtttgagggtcaatatggttcatctcattaaatgtaatccagtactttactttatcatcaaaccttcttattacagtctcactgtactttaaatacaaatccataagttttctgttattccatgaaccatatttatgtactaaattcataggtaattcaaaatgatatagtgttacaataggttctatattattttctattaatgtatctatcagaccttcatagtatttaatccctaattcattaggattttcatcatctccatttggaaaaattcttgaccaatctatagatattcttaatgcactaaatcccatttctttaaataaagctatatcttctttatatctattataaaaatctattccattatgagatggataatccaatttttcttctattttatcagtaattactcttggcgtttcataagagcccttagttacaaaatccataattgcaggtcctttgttatcactatcccatgaaccttcacattgatgggctgcaatacttcctccccagaaaaatgtatctttaatattcatgaattttccctcctaaaatttatactattacagttaataattcttctgattcatcatttgatgagattacatctaaataatcgctagtatttgtaactacagttattatagtagaatcaaagccttcctctataattttatcagattcaaatactgctaaagcatctccttttttaaccctttgattttgtgttacaagactttcaaagaattttccatctaagtttacagtatctataccaatatgaattaatatttctaatccttcatcagtcactataccatatgcatgtttagttggaaatactatagttatagttccatctacaggagatataacagttgattttgattcactaggtataactccaacccctttacctaatgctccagaggaaaatgctttgtcattaacttccccaagtgcaattacctgaccttttgcaacatttccaatactaatagttcttgaattgttctcgttgattattagttctaattctttttcattatcacccttaacttcttctttttcatctgaaggtattcctagtaaataggaagctgctgttgctgctacaaatgatactactacacttattatcataaatgtaaagttagatgcctctcctccaacaagatatgttggtaatgcagctaatccccaaaccattccatatgttttaacttgagctaaacctgctattaaaccacctatacctccacctatcattactgctacaaatggtcttctatatttcataaacacaccaaacactgaaggctctgtaactcccataagtgcactaaaacttactgtcccaaataattgtttttgttctttattcctagtttttaagaaatatccaaacattgcaccacaaactgcaatatcagatattgttgcagcgcccataaaaattgggtcataccccaatgttgtcacagaatttaaagatataggcatagtaaagtttgctgcaccaaaaactattaagagtggttgtaaagctgcatacagtgcaacaacactccaattacccaatgtatcaattaaaaacatacatgcatagtttaatccatcaccaatccacataccaataggtccaaatacagttaatgtaactgatagggttattattaaagataacactggaactaaaaaatagtgtagtgctttaggtaatatttttttcaaaccttcaattataattcccattgcccatactcctaaaagtattggaataaaactgtttgcataagttgtagcctgtaaatttataccaaataaacttaatccttctacaccatctattgatgacgataataacgtaactgctaacactactgctatatagggatttacattaagtctttttgctgatgctattgcaattaatactggtaagaagtgaaatgtagcacttcttaatgtatctaatatttgatatgtagggctatcactctgaagtatgccagacatatttaaaagtgctaatatacttgcgagtataccagctgcaagtagtacttcaattactgaagtcatagtctctgagactaccacaaagatggaattaaatatacctttgatacctctaattcccttttttctttcactttttatacttgattcacttgaacttaaacctatcatagacataaactcgttatatacatctacaacatgagtacctattataatttgataagcaacatcattagaaactacatcaattactccttttaattttttaatttcttctgtttgagcgatacttctatcatttaaagtaagtcttaaacgagtaacacaatgcgctaccgactttatattttcttttccccctataagttttattatattttcatttaaatctttatatttcatctgattttgcctccagtctttgagtcaccctatttatatgcaacattaaataagtttcttcacttatagatatatcgacattaaattgtgattttatatattttcttatcttttgaacacttccaaatgactttggataaagttgacttacttgtttatataaatctatagaattatcttcatctattgaagcttcatctgacataattctttggataaagtactgtagatgagtagtaaatctcatataatttgttgaagtttcatctagctctacattaaaatgatattttattatagaaactatatctgctaaagttctcaactctacaattgtactatcatgagactctttatttacctccatatttacaaaatgaagtgctattgatactgcctcatcatcaggaagattaattcccttactatcaccaattaattttagtgcatgcattccaatttcaaaatgctttggataaaatcttttaacattccataccaaaggactttttataaattgattcttttcacatcttttaagtaaaaactctaaatggtctagtaaggttaagcttagataatcacttgactttatatttaaagctttctcaccatattcaattatttcattaataagaactatattattggagtctgagttttgtagtagataactaaagtgttctagcatatcgtatgaatctagtatatatgttctctctatttcattttcatttattacttgtcccactctttttttaaagccaattcctttaacaaatacaataatttcatttttacctctttttactaaggctacattattatttaaaatctgaattattttcatatattcctcctttcaataaaaagaactcaagcatatatgtatagagtatccctctatttttcacatatatacttgagttctgcctgctaatcagtaacatactcaaaattatgactacgtcgccataattaaaattcttttttgtttaatttcatattctatatgttatactatccatataaatctgtcaacggtttcctagatatttttttattctataactacaagctctgttatgcgattatctggcaaagtttatatactaaattgatactattttactgtcactaatatttacaatattgtctgaaccattatctattttactattatgaattatcatagtaatgattttaaatataatgaactgtatgttaataaataaattcttaagtttagttttatttaatcactattaagatatattaataggtaaagcttcaaatttagttttatttaaatgctattaagatatactaatatataaatacttaaatttagttttatttaaacactagtaagatatactaatatataaatacttaaatttaattttatttaaacactagtaagatatactaatatataaatacttaaatttaattttgtttaaacactagtaagatatactaatatataaatacttaaatttagttttatttaaacactctagtgatatttttaaataaattttaataaaaatcattctattttgtcataaatcatttatctggcttatatttaagatatattggtggatactttacactttttaattcctcattacttcttaaaagtttattattattttccacatcataaatttgtaacattactttatttacatatagagcatgataattatcactataaaaatattgatactcatatcgagggtcatctttgtaatacactttgtatagtattccttcgtaacttgccttcttggctttttcttttgtaatactttttatattatcttttgaaatatcttgttttaccatatacttatcaatatatgtttcagcatctttccatggtttaatgcagtttttatatacaacaaaccctgttacacttataatacctataattaatactataaaaataactttatattttttcatattaatcctccttcatttattatttaaaacttgatataacgcactaaaaaaaggatgttatcttttttattaaaatataacatccctcatatttagcatcaatatatatgccccaactggtaggttaaaagaccccactgtcagtactttgattaaattgcatgtatgtatatatatttttaacaaatctattatatgtcaacttgtctactattacatataatctgtaatattacatctgctgctttttttgagcctcctgcattataaaagctttttgatagtttagttgcattttctttatattcattgtcatttataacttgaaatactgcttttttaatactttcggacttatcctcttttaacataattcctgctcccaaatgaacaactctcttagctaccattctctgctccgaatgttgaggaaataataccatgggtactccataatataaactttcattaacactattcatcccagaatgagtaataaacacatcagttttttgaagtatagcaatctgttcaacactatttttaacctcaaaattatttggtatatttcctaaacttttaatatcagtacttctaccaacagacataatcacatcaacatcagaatctttaaatgcatttatacagtttttataaaagctaacatttttattattaattgtaccaagcgaaatatatattaactttctttttctctctttaggtttaataatcaactttgatactgatggacctacaaatgaatacttactagagaaggtttctaccattggttgaaattcttttgatgtatatacaatggtatccgtatcattatcattagaaactatagaaataaaattttttacttcatacccttttctttgtaaaagctttatttttttattaatgcgtcttacaccaaaaatcatacgtataatttctataaagttttgtttcatcaactttgctgtatgtttattaaatgcaaaagttgttgtagagcatacatatggaatattaagtttttgtgcaaataactttccccaaaaacttaatgaatctgatacaatgcaatctggattaaaatctttaagttccctacaaactttttcatctaaagaaatagtagtatctactatcatctcaattaatccaggaaaatccttaccaatttttttctcatctccagggagtaattctggaaggtatttatcacaacaaataaattttgctccagcaccttcaattttatctttaaattcattaaaagaataatacaatacctcatttcctctatccactaattcacgaactacttcaatagtaggattagtatgaccatatgcaagaatgctaaaaaatactattttactcacatttcatacctccttttataattttttaaaatcattcttctttacgtactactcccatatgacctataaaatttatcaaatcacgttgatgaacaattcctaatcctctttcctcatctccaagtaccaataatttatctcctgcatttatattaaatacttctcttgcttcttttggaatgacaatctgaccacgttcaccaactactactgctccaaagaaaaactttcctttaggaggtactataatacctgttttttcttccgaatgattaactaagtcatctagtttgaccttgtacaattttgcaagtttaatgcaactacctatatcaggaatagattctccagtttcccttagttaaagatatgaaccctctttatcagtctacttttccaataaatcggtaatatatctctatttcctgtattctttcgttatcctcattcgttattgcttcatgaataaggattttttctatcattgcatttaataacggtgctgtcagttcctttggtacggaatactccttgattaactcaatccacttttcagcacctatcatatcctgttccattttacttaattcttctcttaggttggttatctgctgttccagttctatttgttctttttggtacttgctagacaacatcacaaaatttcgctctgttatcttctcacaggctctatcttcatacattttcgcaaacaaacggtcaatttcattttgtcggttctcggctttcttaaaggcacttgcctttttcttcttttcccgtattcgctctgcattgcctgctttctgtatcttgttcagcaccttttcttcgtcctgctgtactgccttagcccaatactgcaatcgtttcaatacggcttgatacaacacatcataacggatatagtgcatagaacaagtacctttgccaaactgcccgtagtaactgcaagcataataactgtaaggcgttttatttgccgtattcgttgcaaaccgcatagaccagccacaatccgcacacttgacaagccctgcaaatatcggtgttgctttttcctttgtctgtctacgtcttgattttatctgttcctgcacacgatagaacacttctttgtcaataatcggttcatgggtattttccactcgaaaccattcactttcgggcttacgcactttcttcttgctcttgaatgaaaccgtagactgcatattgtgaacgctgttgcctatataaacctcactttttaagattgccttgacatgagcaatcgtccactcataacgtttgctttcgggctttccctcaaagatatgtgcaaaagtaccgtaccttgtaaaattcagccaagacgctgtcggaactttttcctctcgcagtacctttgtgattttggcactaccataaccttgataggctagggaaaagattttttcaacaatccattttgtttcatcatcaaccagcagttttcctttgatgtcagggtgtttcttatatcctaatggagcataagcaccataatgagcaccctctgcaaatttcgtcttaaatgccgatttcactttacggcttgtatctcttgccacccattcattgatgatgttcttaaatggtgcaatctcactttcgcctttctcgctgtctacaccgtcgtcaatcgctatgtaacggacattatggctgggaaaatacaattctgtatattgtcctgtcataatatagttcctgccaagtcgggaaaggtctttcgttacaacacagttgatttttcctgcctctatatcctcaatcattctttgaaaactcggtctttcaaaatttgttcccgaccagccgtcatcaatatattcatcaatcacattcaaatgatgttcttttgcatatagacgcaacatacttctttgtgtggtaatgctggaactttcgccctgtaattcatcatctcggcttaacctaagataaagtgcagtattgtaaatctgttgtttcattgtcagttatcctcctttataactaacccgtgtttacaatacctgcttgcaagtaaagtataacacgggtactttttgccattcaatctatgtcttacaactgcaccaattttatgcgattgtctgctttgctttttccagcataacatcagtcagaagttcctccattgtctttcccttttcggaaaaatgctcttttacaacaatctttgtttttcctctgttgccaatgctacgcttattatttgtcttttcttgcattgtttttacaatatcagcaataacacataccccctttccataatcttttttctaagcaattcaacggcatttgtcatagcccacaggaattccacctctgcatagttcttatgtagccgtacccattgcgtgcgacgctctgaacgttcaagctgtggctgtacgggagtatcatttatcagacagaacaggtcatggcgataaaagaggacaagtcttttacaggaacacaaatagggttcgctcgcttttgcagggaaaaggtcatggcgtatctgcttcaatggatcgctgtctgtcaaacgtattgaattgctttattcagttgtcaaagaacatgaaagaagaaaatcgtctttcctatataccgcgttggaaaagagccgaagcgtaaccaatattcaaaactttttctcttttcactacatatctgtacagcaaacgtccagttgctaagttgaaatgaaaatagttaaactctcttttcctgcaccatatagggaaagcaagtatcagtttgctaagttggtgatgaaaaaaatctgtttttcttttcacaccctaactacccatgcaacaccgtaactgccaactatggaataaaagattttctttgctccatatagggaatgaaaactgtcaaatgttaagttgaaattaaaaatcgtttcttctttcacatcatatagggacagcagccaccgatttaatgacctgttttcaaaaaaagttagatttcctttcctcgcaccatatctgtacacaagcagtcattttgttgcagtttttttgaagaaattaaaaaataccgtcattcccttgtggaacagcggtatctttctcaatcatatctgctatgtctgttgtcatttgtttaatctttaattactgcttttctgttagccttgtatgcctgtcgatttcttccagataatttgctcctgttttcttttcaatctcttttatcatcaataaagagggcatgacctgtctttctagccagcgttttattttatccatattaacagcaacaggtgtcataataaacggaagtgaggtcgttacattatctaaaaatatatcccataaaatataatcgggaaaatctatctgtgtgagaataaagcttgctatggtctgttcgggatttcttgaaaaaacaagttgctctaccgtttgtcctgcttttccattttttaaacgaatttcgaagcggttcttaatatctgtttttatacccttgcttttttgttccttttctttttcatacaagcaaaagtagatagaactattctttgaaccgatataaaaagtttttgcagtatctccatgtgtacccgataattttccgctgtctactgcttcatgggttcttgaacgtttccataccttgttagcataataacgttcccttagaatttctatatccagcaatccgcccatatcattgactgctaaatctatgcgtttaaaaacaccttgataatctatacaacatcttaaaaagcaataccagtctatccctcttacctgtaaaacatattctaagtcccgacaccccatacctcttaattccaataaaacacccatagaactatctttagaagcatttacactaatatccccatagatatactgttcttcataagcatacattccgtaatcttcatgtataaaatattcgcttttcattgccagcacattttttataatttccaatgcgtctgtggtaggaaaacgaacacgcagatagtcaatcgttaaagtgaaaggctgtgtacaattacaataatcaagataatgtaagagtatatgtttcatttctttactggcttttgtttttccgttttcaatttcatttaagttctgcctgttgatttgtagttcctgtgccagtcgtgattgcgaataatcacagacatttctcttttgctttaatgtttcaataaatttcatatcattcatgcttcattcctccaatcaaaaaaaggcatatactcataggagcatacaccttgtatcttatatttattttctattgatatgctgttttagacctgtcgggtagaaagaatagggtgtaaagtgaaataagttcttacaaccttataaatcgttgcatatcagcagttttatatttgtttttgctcttgtcttttgtaatagtccccccctgttagataacgggggcttagaaagctcgcaggctcgccaaaccgccaaagtgaaccgccacctcgccagcaagctggcgtggcgatatgtcttacgaccgccaccgctggcggatcgcttcggcggttcgtgaaatttatattctatctataataatcttaaaatctgcctaaccaaaatgaaatggaactaacatattaagtataacagcaataacaactgcactcaatatcatatacgttgtctccctaaaggtgttacgttttaaagctattaatgcacaaccaaagactatcacttctaaaattgaatacacatcaaaataaatccaaccataaataaatgtaaaattaaataaaattgcaattattattactgaaagtataaaagatattttgcttttccccttagcataccaacaaataaaagctaacaatggagaaatgacagtaaaaccaagccaaatcattgcataattttttggaaaaaatccagcaacaaaatacgaatataggtaataacttgaaaccattccaatgaaaaatactaacacatttaatgatgctcttatggaagaatgactataaattgcaatgtacaaagcaatcaataaccatatagcaaaacgaccaaaaaaattactaatatctaaatattcaaatataaatggtaaagtattgcttgctgtagtatctaaaaattttgcaaaagttcctaaaactattccaaaacacagtataaatattgtatttataattttcctagtaatagatatttcattatctatacgccttatctgactcaaaaacttattcataatgcacctctaaattcaattttccctatcaaatgttaaatatcttgtgccttggaatgtcagctgtcctttatctccctctgcaagcactccatactctgagccagatacagacagctctattctatcaccactatctacttgaaatgtcacataatacgaggtgctggaaattgtatgaaatccatgtgctcctgatatatcaccagcgtttggttgattgttatgagtggtattctgacgttttgctactattcttgctgacacagttaagcgaggagaattattgtttttaaaccaagtagctattcctttcacaaaagtgaaaacaattattataaaaatcagtataaacattataggaaataacatttctattagattaaacaatctctttttcctccttaatgaaattctcctttaagtataccatgctcctttaagtattgtcatttcttttcttcatttaaaaagttacttatcagtctaaaataattaggaaaatgaaataatttactgtgttgcattaacgaaaaagagataccaacacatttatgtagtatctctggcttaatagcaatattcttttctctacaagcaggtaaacacaggttatttcagtaatatccttttgtttgggaaactccactttcccattttgctattgattgtctagaaacattaagtttttcagctaattcttcttgtgtatactggtggatttttcttagactttttaaattctcattaatcatatttttcatacctcctatgtttataatattggatttattatttaaattctatcaactaatcttaacattcatatatatatttatatacttttattatataaatttattgttcaggtaacatgtttccttaagttataatagataaaagcaaacacaaatctgtcaaccttcgctaaagtatttaagttagggtcatttacattgttaaatacttctacatcttaaaaagttttactcatcaatcaaatgaaaacttgcaataagaattaaaatcataataacaaaagtgctgtctcaaaataaagataatcttttttcattgttgaaatgataaaaatatatttaatttcatgtaaaaaagtgtctcatgaactaaaaagttcattttgagacactccttttttataataaaacaatactatctacgtctttttaactatatatctagcgcagcatgatgcccttggtatactgcatttgttattgtagatgcacgaacacagtctccaatttgagcaacatatggagcagaatcaagtaaagtgtctaccacttctcttcttggtttttgtccaagtgcacatattactgaggttcctggaatatttattttattcccagatttattcatacatactacaccttctgttgttacacttaaacccttatgttctgtatatacatatataccttgtctttctatttcttctaataatattggacgatgccttatatttgcatctggggcaagttctgctctcatctctactaagtgaacagtcttctcttcttgagctaagtgaattgcagcctcacatcctgctaatcctccacctaaaactattacttcgtcagtgactttttctttttctacgtaataatcattaactattactacattttctccatcaagaccctctattggtggaacaagaggttcagaccctactgctataattaatgcatcgacattttcattttcaacatattcttttgtaactgttgtatttaaacgtacttcaacacctaaatcttttgctatttttccaaaagtatttcctaattcatacattttatacttaaatggaagtgcttgttctccctttaaaattccacctaattcattagttttttcacaaagtattactttatgtccacgctttacagctgtaatggctgcttgcaatcctcctggtccaccacctgctattaatacttttttaggttttaatactgaaacaacttcagttccatctaattcacgtccaataagtggattaacagtgcagcgtcttgtagaagtggtagcacgttctgccatacaagtgaagcatcttaggcatttcactattttttcatcttgattactcataacttttcttggtaattcgtggtcagctagtaatgcacgagccatgtaaataacatctgcttttccactagcaattatctcttccatcatttctgggtcatttaatgctcctatagtagcaactggaatatttacatgttttttaatttcttctgcaagatatacgttacatccatgttctaagaacatagaaggatgtgttactgcaaaccctctttggtatgtacctgctgatacatgaagtaaatctactcttgattccaataatttagcaatttctgttccataatctaaatcataccctccctcaaataattcagaaccactcatcctaaactctattggaaatcctggacctactgctttacgaacactatctaaaacttctttagcaaaacgaactctgttttctaaagaaccaccatatttgtcagttcttttattaaagtaaggtgataagaattgattgattagccagccatgtccaccatgaatcataatcatctcaaaccctgctctcttagccaatgctgcaacatttccatatgactctactatttcagcaattatttcttctgtaagttcttttatctctaatccatcaggacgaacactaggacttactccccattgtgataatcctcgcttcttatctttgtcaactaaataagttcctgaatattgtcctgaatgagatagttctacacttggtattgctccatgacggcgaattgcatctgctgtataagtaaaacttgctaaggaatcaactatttttaagtctagatgatatgcatgtgaaccatctgtttctggatgaaccatacattcactaattgtaactgcacctgctccaccttttgctcttaattcgtaaaaggctgttgattttgagccaattgtacaatctgctgttatgtctgttccccccataggtgctgaaaacattctgtttttgaatgttacatttccaattttaattggcttacatagatttggatattttctttccattttttatatctccctttattaaattttctatctttaaattttgtattttatttatatatttatataaaaatgttaatataaaacctattaaagctataattatagctataatgaaagccctttgataattgccatctacagaatatacatttttcatcactgcaggtccaatatatcctgcaaaagcaaaaccaataaacatgattccataatttacactattatttttaggtccaaatttatctactgtaaatcctgggaaaattcccataaatgaaccaaaacatatacctataattattattccaatatagaatgttgctacatctccttctcttgagaataacaaacataataaaccaaaaattgaaataactaatgcacctgataaagtatttattctaccaattttatctgatatatatcctgcaacaatacggcctaatgtattaaacaaggctaaaattgaaaccactattgctgaatctgaacttgtcatcccaatcatatttgttgctagagaagatgctaatgacacacacattaatccatagaaagctccacaagttaatattataatcattagataaaatataggtgttgaaagcatttctttccaatttttattaataacaactcttacttttccttttttctctggtggtacccatccttctggtgtgaaatctgctggacattttttgataaagaaagaagaaacacatacaattataagaaatactaaacctattgatttaaatgcagaagttactccatatttattaattatccaattagcaactggaggcattattactgaactaaacccataagctgctgttgttataccaccaactaatccacttttatctggaaaaaatttaattgaattacttattgtacatccataaaccatgccaaccccaagacctgttattatcccatatgataaaatcaacataggcaatccttttgagaaacctgccaatatcatacctataccaaaaattaatcctcctacaaatacaacttttttaggaccaaatttatcatttatcattccccctgtaatcatagtaataggtccaactgagtttgtaactgtaaatacaattgctaaactagcagctgtaaaagttgttccagcaagactatttaaatgttctgccataggtgatgcaaatacactccacgcatatattgaaccaatacataaattgatgaaacaacttgcaattaatataatccatcttttttgtgttaaattcattactctcctcctcgataaatttattaaatagaatttcttagttaagattatcacaattttttctatatgtaaatataaacatgtaaatacttacatgtttatatttacataatttcatttttatatatagttttatttattttttgttcctcataatttaaaagttcttattaaaacatagctatattaattaattcaaactaaatatatcgtgttataataagtatgtaattaaagaaagaggtgtatttatgcgaactttaaagtatgcaattttaggattattaaatagaaatcctatgactggttatgatatcgtaaaggagttcaattttcaattagctgagttttggaatgcaaagcatagtcaaatatatcctgaactaaaaaaattggtaaatgaaaagcttattgtatatgatattaaaattagtggtgatgtattagagaaaaagttatacacaatcacagaaaaaggtaaagatgagttcttgaaatggcttgaaaaggatgagccaatggaaagaacccctaaggatatttttcgtcttagaatgtatttttctaataatttagatatagatactaggcttattttactagagcatcaattgcttcaacaccaagaaagaattacgttcttgtacagtcaaatggagcgttatagtgaagttcctcctcttgatagtaatgattttggtgattatatagttcttgatggagctattatcagggaacaaggtgctataaaatggctaacaaattgtattaaccatcataaaaatttggataatactactttgaaataataacttattgattttaatagtgtatttaattatagacattaaatttataaaaaagactgtacacaactttgtctttgtatacagtcttctatggttgattattcaagatagataattataatatttaaaacagttaatataaaagttaaatattttttattaagctatcaattttatcttcttattgcccttcaaaatcatctttatatttacaatctttcacatgaaaattactatctcttcttatataaaaatccagttgatattttgttactaaatttaatggtaatcaaattctttaccaatgaatataaaaattactaatgtgttataattttcttaactactaaattttacatacatttgaatagaatatttcaataaagtactataataaataaaaaattaagagttaaaataaaaaatagttagggagatattattatgattttatattttagcggtactggtaatagccgatatgtggctcgtaaaattgcacaagaattaaatgatgaactgatatcactaaatcaacttataaaagaggaaaaaacagatgaattaatatcagcaggtaaaccattcatattcgtatgtcctacttatgcatggagattgccaatagtggttacagattttataaaagaaacaaaatttctaggagacaacagagtttactttgtaatgacttgtgggggagatacagcaaaatccataaactatattcaaaaactatgtaaatacaaggaatggcaattaaaaggtatggcagaaattaaaatgccagagaattatatagctttattttctacaacagacaaagaaacatcaaaacaaatgattaaagaagcagataaacaaatatataggattatttctgatatacgcaatgaaaatgaatttgaaactattactcctagtggcttaggaggtacaattaaaagtggtataataaatacagttttttataagacaattattagtgccaaaggatttcattatactgataaatgcattggctgtggaaaatgtgtagagctatgtcctttaaataatattaatttaaaaaacaaaaagccagtttggaaaaatagctgtactcattgtatggcatgtatttgtggttgccccactgaagctattgagtataaaaataaaactcaaaacagagaaagatactatttagaataatatattcttaatatttaaaccattataaaatgaactatacccattgttttatacagttttacatattttaactgtctcctaagatgggtatagttcaaaagatagtgtctcaaagtgaactttttagttcctaaatcaatctttttgtattaaatcaagtataatttaatcaccttttcttatatcattttcactaatatgttgtattccaacaaatataagatttattagctctgttagtgacttccattgtgatttttttgaatcaagataataataatttttcgttccttctctacgcaaattaacaatctctgcttcttttaatatcttaagatgatgagatacagcaggacgagaaagatgtgttttttttgtgatttctcccactcgtataccattaaaatcactctctaagagagcaattaaaatcaattgtctagtctcatcacccatagcagagatagctttgcgacattctttaaatttagatgttatttcttgcattctttgttgacattctttttccataaaatccaccctctcttataagtatctaacagttgctacttctttctgtgcagtacgtctatatttaacatctgggtatccaattactaatgttgtaagaacatgattactgcgttttagacctaaaagcttttttaattttggcgaattatttgctacatctgaaaaatatccactaaataaaacacctagaccataagactctgccattaatgccatatttgatgctgcaagtgaaccactaatcttatcttttgtaattatcattattgcaataggagcatgcttaaagaaaaagttatcgtcaatctcaacttcttttgaatatttaatagctatatttgcaataggttttatttttctaaaaaatttcactgcttcgttttcataaattgactttttattgtctaaaacaatatatgatacatcttgtgaatttttagcactaggggtatacctacctgcctcaataatttgctttacaatttctgaagaaacttctttgtctttaaatttacgtatacttcttctagatttaattgccattagtaattcatctgaatctagctttggcttatttgtaagttctataggaggttcatcaaatcctgtcaaggtaatagcttttgtgggacatattgctgcacaatgtccacacattagacaatcttgttttttaattactgactttttattttctataattatattgtttactggacaatcatttttacaaagcccacatccaatgcaaagttctttgtcaacttctattatatgttggtatttcatattcattcatctacctttcgtttattagtttaaactattataacacgtagacattttttatattcattggtaaagaatttgattaccattaaatttttaatttctctattaaataaatttttcatagaattttaaagtatcatagtttatacataataaaaaagacaagcttaaaacctaagctcgcctttttcatcttttattacaaagtaaattgcacttacttcccatacttcttaacaattttattttctaaaattttatttgtgaatcatactattgcataaatacaatgtaaaataattctgtattgattttctatagttaaaaaagttaaaaattatacttattattaatttttatactcttcttatttaatacaaatttcttatttaacatagatttcttgtttaatataaatcttcaccatttgaagcaattactttcttataccattcaaaacttttctttttcattcttcttagacttccattaccactattatctctatctacatatataaatccataacgcttttccatttcacctgtaccagcacttactaaatcaataggtgcccatgtagtataacctaataaatcgaccccatctatagaaactgcatcatgcatagcttttatatgttctcttagataattaattctgtaatcatcttctacataaccattttcatcagctatatctttagcacctaatccattttctacaataaatagtggcttttcatatctatcatatacatgatttagtgtaattctcaaacctaatgggtcaattggccatccccattgactgtatgaaagatatggatttttagcagatgtaaatatgtttccttcagccatatcatctgcattttcatcagttctaacacaacggctattgtaatatgaaaatgaaataaaatctactgtatatttattcaataattcaatatcaccaggttccatttctggtgtaatacctttttgctccatatactttaacgcatagttaggatatttacctttagattgtacatccacaaagaagtaattttctctatctaactttgtagcttcccatacatcattaggattacaactataaggatatacacttccagctgcaaacatacatccaactaagttatttgaatcaacttcatgtgctattttagttgcaattgcactagctacaagctcatgatgagcagcttgatattttatcttttcaacatcttcaccttcttcaaagcaaataccagcacccataaatggagcatgtaaaatcatatttatttcattaaaggttagccagtacttcactaatcctctatatcttctaaagataacattgcataatttctcatagaaacctatcatttttcgattacgccatgcaccatactttttaactaaatgcattggacaatcaaagtgtgtaatagtgactaaaggctctattttatattttttacactccttaaatatattttcataaaattgaagtcccttttcatttggtgtttcttcatcaccttttggaaatattcgactccatgcaatgctcattctatatactttaaatcccatttcagcaaataactttatatcttctttataattatgatacatatcaataccagttttagctggataataatgctcatcatcaaaatcaaacatttttagtttccctgtaataactgctgttctatcttttcctgttggacatacatctacatttgccaatcctctttcgtcttcattgtatccaccttcacattgattggctgcagtagctcctccccataaaaaatcatccttaaaactcatagtcaaagcctccttaaattataaccaaagcactagcttatgctaatgcctcaatttttactaaaataagactgtaattagattatcttctaattcaatatttttactttctgtttctactacatctaaaaattgtgatgaatttgtaataacaattggagttacagtactataccccaactcttttattgcatcaacatcaaagtttaatatagtttgaccttttgtaattctatcaccttgttttatacatgcctcaaaacctctcccttctaattgaatagtatttaatccaatatgaataagcacttcaacacctgtatcagaaagaatccctatagcatgtagactaggaaataaggttgtaactacaccatctactggagcaactacttttccatcactaggtattattgccaccccttgacctagtacaccagatgcaaatgctgcatcctctatatcacttaattttaatacttcaccttttataggacttgctactatttctctttctaatttagtagacttgacttcttttatttcttctttccccttatttcttacttttttagactcttctactttctcatctttatataaaatcatagttaatacaaaagctacgaccattgatatagctataccagaaagagctactattaagttgcccattcccccatctggttcaatcattgctggaagttcaaatattcccatacctccagttataaattttctaagattaaagaatccgtagaaagcgcctccaatcccactagcaatacaacttattataaatggtttctttaaaggcaataatattccataaattgctggctctgtaactccaaatataccagatataaagtttggtattgtcatctcttttagttttttatctttagtcttgaaaaatattgccaacacaactgccgaacttgcaaatgtacaagcaaagaatggcatcataacattatcatatcctaaagtcataacattgtttatatatacaggaataaatccccagtgcataccaaaaataacaagaatttgccaagtaaaccctactatagcacctgccaatagtggactaaaatctcttattgaaattacaatttgtgaaataagtgtagaaccaaatgttgcgataggacctataactataagtgcaacaggcactgttattaataatgtaagcattggcacaaagaaaaacttaactaaatctggaacaaacttattaaataatttttcacacctagaagcaaaatacactataaatataattggtacgactgttccagtataatcaattgatacaattggtagtccaaagaaatcaatatatactggtgatgcaaacattgttcctttaaataaagtgtacatcacatctgctcctgctgatatactgctaccttgtatagcaggataacatactgcagctcctagtgctaatcccaacattggttttaatccaaacttcttagctgaagtatatcctaagaacaaaggaaggaatgtaaataatgcatctcctgctgcatttattaccatataaccaccagatacatcactatataatcccattgctacaaataatgcattaaatcctttcagcataccacaagctgccattattcctaacactggctgaaaaattcctgatattatatctatacctttatctagtatattacctgattttttagtttctgaacttgtacttgaatcatctaaaccaattatttcaactacatctttatagacagcttcaacatgatttcctataactacttgatattgtcctccacttttcattacagtaacaataccttccatgttttttaatacattgtcatttgctatactttcatcttttaaagtaaaacgtaatcttgtaatacagtgtactaatccactaatattttcttttccaccaacattgtttactatctcttgtgctaattgtttgtattttcccatttttctcctccatatttcgtttaaattaattttttgaaatttgaaggtttggccaactcaatgttaccatccaaccataggtataattttgttagtatcactcctttcaatcattcttaatatactactgaaaaattatttcacttacatatttgagtctttaactactttagctaaatgtattgttaaatatataagctcatcatctgttaatatgtagttatattgttttttaatgaaatttttaattttaactacacattcaaactctttattatatttagatttaataatgcttagtaattctttgtctgtctcaccttcatgtgcactatctaaaagcaatctttgcgcaaaaaactttaaatgcattataaatctataataaaacactgattcttcatgaaattctatcctaaaatgatacctaactatgctaagtacttcttgtattaacttcgtaatatcagatgccaaagtatgaccttcacttaactgagcattcactatatgaaaggctataaatccagcctcatcttctggtaattttatacctgttttgttttcaataatatctagtgctttcattccaatttcaaactcttctttataaaatcttttaatttcccaaagaattgcattttttacatttattccttctttcattctttgaattgcagaatatgtatggtcacttaaggatatgtaaatactttcatttagcttcttgtttaactttatttgtgcgtattctataatttcacttgataatttcatgtgttctataggaatattattgagtaattcttgtagtttgtttgatatttctttatttgatattctaaatactttatttactttagttttatctattagattgccttttgatttttgataaccaattcctttacccataacgataacttcttcatcattatcatctaatgtgattacaacattattgtttaatatcttattaattatcatgattatcctccttttaagcataaaaaaagcttatccataataatgggcatactccttcctaggatactgctattattaatgaataagcttagcttgtacttaaacaattactacctaattccaattaatatgataaaacatcagacatattttgtcaactttttatttccatatacttcatcaatcttttgtgttgctttttgtcagttataataattattatcattaatattaacttatttctttgcatcaatataaatacaaaacaagttatagtcaataataataaaaattctattaatgtaaatagttaatattatacttcctctactacattatctgtactttccttaacatttttttcaactccaaaaacatatgtcataataaatggagcaaccaatgctataaatataactataagtccatttactatatttgaaattcccttttcccctgataatccaagtactgccattatactattttgtggaacatataaagtcacatgagtaattcctgcaaataaccctgcgattcctgctcctatagatgctaacatagcaggttttttaagtttcaatgtaactccataaagagctggttcagttatacccatgatagctgatatccatgcagctgatgctaactgtttcatcttactatctttgcttcttaatgctacagctaatgtcgcgccaccttgcgctaaattagcacaaacttgagatattaatattagcgattcttgtcctgtagttgcaaatgctgatatgaatataggagtcaatgcatgatgcatccctgtcataacgataaatggcattgcagctgctaataaacaaaccattataaatcctaaccttccttgtagtaaatttattatactagctaatccctctcctaagaaatttcctattggtccaattactattaatgctattggcgcacttattaataatactaaagttggatttaaaattgtttttaacatgctaggtgttaatttattaatgaatttttctatatatgacatcatccatactgttaaaagtgcagggataacagatgctgcatatataacaccttgaattggtactcctataaatgatatagggtccccacttgatacccatgcagagaaatttggatgtaaaaacacacctactactataactgctattgatgtattaacattaaattttttagctgcatttattgcaagtattataggcataaagtaaaatgctacatctcctattatatctaatactctatatgtacttgaatttgatgatagccaattaaaagtggtacaaagagataatataacttttatcatcccagatgctgtaagggctggtatcataggtgtcatacaaccagttattgtatctattatattatttaaaatactattttttttattttcattttttatatcgcttttaatatctcctgtggtatttatccccttatttattattgcattaaatacaacacctacctcattacctattatgacctgatattgagttgaagttgagtttactccaactaccttatctatagattttaatttatctgcattgactttcttttcatcttttaagatgaaccttaatcgtgtcatacaatgagttaagtcaattatattatcctttcctccaagtccatcaattatcaattgagctacttcttcatatttattcttcataccttatcctctcttttaaaataatttttaatataattttaatccaaattaatctttttactccaagcttgtaatagtgtattgtaatttaataagctagtatcttctacaatatggtcacattttcctagtacttcttttttccccacaccaattgatgtcatattggcagcatttatagctttaatacctgaataagaatcttctattcctacacaatcatattgttttaaatttagcatcttgctcccttcaataaaaatatcaggatatggttttcccctttctaataaggatggatttactatacaatcaaattcatcttttattcccaaagattctaatatcctaggtgcattcttactagcagatgctattcccaatttcacattattttttttaagttcttttataagctcatttatccctggtaatatatctttatatgttaatgagtttattaactttatataaatgttatttttttcttcacacacctttaacttttcctctttagtataactatctactttattagcagataacaatattttatctaatgattcttccctgcttatgccttttaatttttcattaaaagtttcatctatttctatatctagcgattttgctatctcatgccaagcttcaaaatgatacttagcagtatctgttataactccatcaagatcaaataagactgctttcatattaattactccctttaaaacaattattaacttctattatgttctttgataattttatttctttattatcatgtaatatgcttatgtttttacctttgattaacttataataagatttatattcttctatatttacagaaactaaattatctctaaataatatattaaatttaatatttttccagtgtttaggtatccttggttcaaaacttaatttatccttttttattttcattcctgcaaatccatatactaaactcatccatgttccacccatattagcagcatgtattccatcacttgtatttttttgtaggttattaatatccattaatgctgtgtccataaaatagttataagctttttcatgatttccaatttcacttgccatcattccaaatattgaccttgacaaagatgaatcatgagtagttattttttcatagtattcaaaatctctcttcttttgttctaagctaaactcatcagggaaaagcaacgctgaaagtacagtatctgcttgtttatttacttgatatctatatattgttaatggatgataattgagaagtaatggatatttttcttttggtgtatttttaaaatcccatactgatttttctaaaaatgaatcgtcttgtttgcttattttcttctcttcatcatatggtaaataaatattttgagcggcatttatccagtcttttacttcatattcttgtaatttaacttttctaaatacttcatttgaaaataaattatgcttaaatttatctaccatctgtactgcatatattaaattatatttagccattaaattagtgtagtaattattgtttactattgctgtatattcatctggtcctgttactccatttatacagaatttattattttttaattctatataatctccaaattcaacccaaaatcttgctgtttctataagaatttctaagccattttgcatcataaattcttcatcattagttgcttcaaaatacgttctaataccataagctatatctgcatttatatgaaactgtgctgttcctgctggataatatgcactgcattcattaccatttatagttctccatgaatataagcaacctttatttattccaagttccctagctctttctcttgatgcatctaagattgagtatctataatctaataaagctctagcaatggatggttgagtatatataaaaaatggtaatatatacatttctgtatcccagaaataatgcccctcatagccatcacctgtaagaccttttgctgatatattagtctttccatctcttcctgctgattgataaatatgaaataaattggtttttatacccagttgaagagttttatcgccttcaatctctacatcagaggttgtccaaaactcattcattttctttctctgaatatttttgactttatcaaatccaatattacatgcttctcttaaaaccaattctaatgattttaaatgtgcttctgattctaaacattttaacgactccagacattctaatgattttaaacgttcttcatttagatttaaatcagaatatactctactatagcctacaacaatttctaaatttaacctttcatcttttttggcatagacttctatttctcgctcaatacattcatctgaaacattataggtctcatttgtaatatttccacaagtaatatatgaatcaaacccacaccataaccctaatctacttctttctgtaactaaattcataaaatacttattgttatatttttttacattaattttaaattgcttcttatttatagatgccactcttgggtcatctactttttcacaattaaacttctccatactattttccattttatttttaaattttatttttccattaaaattcaatggtgttattgtatatgaaatcatcattaattcttctatatcttgtgatactaatctttctatagatactttaacttttctaccacgagagttttcccatataaatgaacgtttaacaattccttcatttaaatctagtatcctagtatgttcacttgtaataccttttgataaatcaaagcaatctccttcaatagagaaatttactatatgagcattaggtaacttacagatagtctgattttgttttgcatagccataagcgctttctccatatgtaattggagattcttcataaaatccatttacatatgtacccatattatctacatactcattattaaaatcggactcttcaatattccctctaactcctaaatgtccattagctagtgtaaacaacgtttcattggattttattgtatccttactaaacccttgctctataagttggtccttagtagtaaatattaaactcataataacactcctttcttaaaatgaattatgcatgagtttccatatcattaaataaaatttctccatctgtttctattacttttttataccaaaaagcactttgttttttagttcttttaaatgagcctcttccatagtcatcagaatcaacatgaattatgccatatcgttttgtcatctttccttcacttacactggttacatctatacatccccacataagatatcctataagctctattccatcttcatttactccaagaatcatatttttaatatgttctttcatgtaatctatacgataatcatcaattatttttccatcttcatttacaatatcttgagtacccagtccattttctactataaataaaggtaactgatacctttcatataactgattcatagttattcttaaccctacagggtcgttttgccatacactatttgattttggaagatatggattttttatggtttctggtccgtttgcctttgatttttctaaaccttcagctctagctgaactacaagcactagaataatagctaaaagatacaaaatctacagtattatccttaagtgttgataaatcttcctcttttattattaattttatttgatttgattttaaataataattcataaagcttggatacacacccctaacttgaacatcagaaaaaaacaaattatgcctttcatgctctaaagttgcaaatacatcttctggtttacatgtgtatggatatgtttttccagcagctaacatacacccaaacttaaattctttatttatataccttcctatttctatagtttttgcattagctaataattgatggtgtgctgcttgatattttttctgaagttgattttcatcagctataaaagttaacccagcacctatatatggaatatgaattatcatattcatttcgttaaaaggaatccagtatttgacatcatctttatatcttttcatcaaaatttcagcatattttacatataaattaaccactctcctatcagcccacccagaatatttttcaactagagaataaggtatatcaaagtggcttatcgttattaatggctctatattatatttttttaattcttttattatattatcataaagttgtaatcccttttcatttggttcactttcttctcctgttgggaatattcttgaccaagatatagaaaatctaaaacatttaaaacctatttctgctaacattgctatatcttctttgtaattttcacaaaatttaatccctatatgacttggatagtattgattattttcatttaaaatattatcctcatctaaacatacatcttttaatctcttatcatttaatgggagtttatcaaactgagataaaccttttcctccatctaaataaaatccttcactttgattggctgaaattgcccctccccataaaaaatctttccctaatttcatgcatctacctctttcacagtataaagttttataatttctatctcatatttagttataagatttttttcatactataccttttaaataattcaatttaaaaatccaattatattttttactcactataattaatattgtctattttcaatactttcatattaaatatcaatattagatatctatgtatataattatatatatagcaaatacatttttatatcctcattattgttatcttattctcatatattgctgtatatttatatatataaaaggatttatttcgaaatagagattgtattgagaactaaaatttagactttataaatgaatggaattttcattgttgaaatactgaaaatatatttgatttcatataaaagaaagtgcctcatgaactaagttcattttgaggcacccccttttttctccaagctattatatctttttttaaattctaatggagagactccaattttttctttaaatactctgtaaaaagtttttgtacttccaaaaccaacttcttcaaccaaatctacaatggatatattgttattaagtaatatccactttgctttttctaatctatattcatttaaaaaagttataaatgtttttcctgtattttttttgaaaaatttagtaaaataatatacactaaatcctacttcataagacacatcttctaattttataggttgtttataatttttttctacatatttgaatatattgttcaatctctctaatatctctttagagtttatttcatattctactgtattttcttcaatttctctaggaatctgtctatataatataggaattaaattatacattttaccttttattgcataactatatccttctattttgtataggtcttcattgtagatatctatcaatatatcgaaaactgactttcttatttttgctgaccaatctctactacatttttttatactactgaataaattaattaagctttctttttcctcatttaataaaattaaatcattaaaaaaagatatatcaaattgaaatactaatctttcacttcccggtgatggcagtatataatgaatatctcctccttttattatcactatctcgcctttttttaattgcataggcttgtcatttataaatagatttactacaccttctgttataagtaatatttctatttccttatgccagtgtggtgttgttaatacttctccttcatttgatagactacgaaaaggaaattcatgtattaatttaggcatttctaaatatattgccatagatatcctctcctctctagtgtctaaaaattaatctatactatttaaaagaatacacattttattttaaaaacctcaaatttataatttatacaatacctacacttcataaaatatatctaatatttctttttttgtatgtacatttaaaagtctttcacttatatttttaccacctaaaatgtaagctattttagatattaatatcatatcttcattgcctccagattgtggcatagcaaacataattattacctttacaggtaagccatctatacttggccaatctacaccttttttagatttacctattactatggatgccttctttacatattttgtttttccatgtggcatggccatttgataacctatactagtagagcctattttttctctatgttttaatgcctttataaacttactttttaaagttatacttcctgtatcgtataatttatctactaattcctgtattatgccttcttttgtagttgatttcaaatctaaaataatgctttcttctgttaatatttctctaatttccatttgttttctccaatagattattcttaaataatattttaatatcctctttgctcttgcaatctattatatagtttatatagttcttttgcctatataaatttgatatttccattaaaatattctttaaaaaactttgattactaatttctaaataaatatcaatcgttctagtaacattattgatattcattatccctttatttaatttactttgcttatgtatatatatattcaaatcttttcctaatgaaatagattcatatttactccctaaattcacacctattaaactttccatctgagctacatcaaaattaaaatatatattatcttctaaatacattcctaataagtttgtatctaagttcatactttttttaggtttagaaagtaaagcattttttatattattaatatcactttccattaatagtactgatacaactatatgtaatttatctttcaaatctaagtttacagtagatattacaaagtctacatcatctaaatttcgcttactcaactgatgcataggaactatatcaactatagtccattcaggaaattctctttttaatctggctgcaaggagctgagatgttccatatcctgtatgacaaactactattactcttttactactcatatttctttctattgccgcttgaaaatatgtggcaagatacgaaacttcatctatactaatattcttcagattatcatactctgtcataatatttatagtcatcatacataatcccagcacatctgaaaatcgctcttgtatctctcctaacaacgggttttttatttggatatcatatcttaatctgtttaacataggccttacatgagatgctagacttttttgtagtaagtcatcatttttgagatttatatttaaaaattgtgacatattctctatcattatagatgaaactttttcactttcacttaatatatctgattcatcattataactactattattttcgctactaaatccagatgataccaaaaaaatatatatgtacataatttcatctttcgttatttttactctgtatctattttctattttatctataagtgtagtgacatttttatatactaactcgtccaaattatctacagaaatttctctttcttcctgagattctatttgattaccttcttcgattctctttaaacatataagtatatgggtaattaaatttatatagtagggctgatttatagtatatcctaaattgtattctaattctgtaattatagtttctacaaatataatagaatcaatatcaaataaatttatcaatgcactaaatgtagcagaatctaatcttgttaactcagatatatcatgttgttcataattttcatctaataaatcatccatcattttggcaatcgatttccttatatccacttctttacctataatcttagttccttctaaagttttattaagttttaaattgtattcttttatccatgcctctatatatttaaaatcatttactatagaagttttacttacataatatttatctgctaactgatttattgaagttatattatttgaatttagtaataaatactttaaaatctccattcttctctgctctactgataaagatttattttccttcgattgtatatttaaactattaattaagtctatgttcttctttgctaaatcttctattaatattccatagcctctttttatatcaatttttatattaaaagtttctaaatatttctcaatcatcttcaaatctttttgtaaagttttatcagatacatttaatttatctttaaagtattttataggtctatatttattttcgtttagtatcaatttaagaaattcaatttgcctcgacacaagcatacttagccctccctacctatgtttatatatttctatgtttatattaagtactattttaacatatttactaactatgtaaaattactaagatacttctgtatcataaaagaatttatgatacaccttactaaattgatataatagataatataatttcaaaataaaaattaaggatatttagaagtagttaactgattctaaatatccttattattattctatatacttgttgttattccattacttatttttactattatttataatttaagcaccaagtaattcaacttcactgttttcacttcttatagtaggctttgctacccctataatcaatgctgttattactgtaccaatcaatatacaagctatatatgcaactggtgcactacatgcaaatggtattacaaatattcccccatgtggtgccattaaagttatatctaaactcatacagattgccccacctatacaagaaccaattatatttgctggaatcattcttaatgggtctgcagctgcaaacggtattgcgccttctgttatgaaagatgcccccattatagcagttggtagagatgactttctttcttctttagtaaacttatttttgaatattaacatagctaatgatatcgctaatggaggtaccattcctcctaccattaatgctgctgatggctcaaatatattacttgaaaacatagccaatccaaaagctgaagctgttttattaataggtcctcccatatctgatgccatcatccctgctaatattgcacctaataatactttattagttccagacatactttgtaaccaagattgtaaagcttcatttaaccatgatgctggcgtattaactacaaagaacattatagctccactcgtaaatgcaatcaaaagtggacatatcaatacagcatttactccttttaatacatctggtaaattttctgttatcttcattactcctaaagctatatatcctgttgcaaaaccagctaccataccacctataaaccctgaacctccaataactgccataaaaccagctatcatagcaggaggaaatccttgtcttcctgctattgatttagctataaaaccagcaagtatcggtataaataacttaaatgctgaatcgcctccaagttgtccaaagaatccagctatagggttgtatgtttcatgagttgggtctgatgcaaatataccaaacataaatgctatggctataccaattccacctatcactacaaatggaatcatttcagatacaccactcattaagtgcttataaacaccctttgtctctgacccttgaagcatttcttttgaatcttctaaagtctttccacctggtttaatttctttagccattccattttcagcgtttataattaaatttttagctaatgaaacattcttagcatctactactttcttttgtagcactttctttcctataaatctactcagttgaacttctttatcacaagctattattacgtattcagctctttttatatcttctttagtcaacttattttctacacctatagctccatgagtttctattttaacttcatatccaagttcttgccctgcttcctctaatgctttttttgccataaaagtatgagctatacctgttggacatcctgttatcccaactataagacctttattttgattattactaaaatctcctgattctgcagctttattattaaatatacttaatatttcgtatggagtttctgcacttagtagatgcttaagaaaattttcttccattagatatgtagctagtttagatataatcttaagatgttcatctgaacctgattctggaactgctatcataaaaaatgacctaagtttttgaccatcattatctgtaatctctctatctgttcttaaatacatcattacaggttgatttactacatttgacttagcatgaggtatagctattaaattacccatattagttgatgattctttttcacgtttattaatatcagctataaacttttctttattatttatataatttccatggtacaaatgatttgccatataattaattacatctttttttgtttgtaattgtttatctagtacaatacaatcgcttcgtagtattttacctatcataaattctcccctccttttaatttgttacctcataattaatttttatttttataaaagcactttaacttatctatagcattgaatagattcattttaaactctataacttctcttgcagcttttatacatggtggatatatagtatctggctcatataagcttgggttttgttctaatagttctctgcacttcttataatatgccgacttaacatcactcgaaatatttattttacaaactcctagtttaactgcttgtgctatttcttcatctggatttgatgaaccaccatgaagaactaaaggtatatctactacttctcttatttcttttaataaatctagtttaagctctggtttaaaaccttttggatatataccatgtgctgtaccaattgcaatagctagtgtgtctactcctgttttttcaacaaaatccttagctaattttgaatctgtatatattatttcatcagtaccaccttcacttgatgttcctgttgttcctattgttccaagttctccttctacggacacatttaatccttttgctatttctactatttccctagatatagctacattctcttcatatggtaaatgtgagccatcaatcattactgatgtaaatccacatcttattgcccttaatatttgttctttattttccccatgatctaagtgtattaccataggtactttactcttatttgcttcttctatgcaactaactacaaagctatcgcctagaaaacttagctcatttgggtgtattgcaagtattactggtgcatttttttcgttagcaccctgtactactgctttaagtatttgcccacttcctatattaaatgctggtacagcaaattgattttcttgtgccacttttagcatttccttcatattgattaacatattgtacctcccgatattttaaattttaggttgaatttacttcttgttaattttgttgttgtttatatttaaataatatcagggtaatgaagctcagaaaataacaatcgttttccttattgaaaaggaacttttattatacactctaagttccttttcactaaataatttttagaagtctgtatcatagttaattatatttctcatgtacatcttctctttttaagtgttttaatttaatgtgctttagccatcctatatttttataataaacaattaagatactttaactataaatttaaagatactcatgtaatagttaatgctatatgggagtcaaaaaattaaaaagatattagctatttagccaataccttttcttggatttcaatagtatatacgatttataggaatcatactcacgattatttaatgttttacttccataaactttacataaaacaccaaagtgtcacccttcaaattcatctttagctaataaagtgatttggttttctaagcaccaatttataaattagcctttgttatcttatgtaaatctttttctatctaatttaaaaattattcctaatgctatatagcatataccaattactaatacaccataagccatagatactcctatcttaaattcttgcatattagttacaatagaaattgaaataggtctattataaacaccataaagcaaggctgacattgtatattccccaattgtacgaatgaatactaatatagctcctgaaattattcctggcatcatatttggaactattacattataaaaggtttttatccttccagcacctaaactccttgatgattcttctagtcctaaatttattgacttcatagcaacctcattggatgaaaataataatggtagagcataaattgtatatgctataggtacaatataaaaacctcctattaaggattcattaaaagcaaatatacttttttgattaaatgtattaattaggttaactgcaatggcgcttgcaggcatactccaaggtaacattataataaattttgctagtcgattatatgcagtatcctttttaattactaaatatgatactggtacagtaattatcaatcctactgctactgccattaaagacattttgaaactatttaatataggctgtaatacacgtgatttttggaaaatcatctgatagttttccagtgtaaagtctctaggaaatatggttgtcataattgaatgtgtgcttacaaaggataaatacacaatagtaactataggaagcataatcataataatttgtatttcaataataaccttacatacaaatgtaaataagtctttttttctattatgaactttataactttgagattttaaggatggcactactccatattttttgccataatactgtaataaaatcataaataaaatccccattagtaataaagtaattacttgaactgaagctatatccatatggttattagccttagacctaacaatttgagtgcttaaaactttaaaaccaccacctataagatttggagctgagaaagaactaatccctgatgcaaaagttataatagtagaagttataacagcaggtgtaataacaggccatattacatcaaaaaatactcttagctttgatgctcccattccttttgcagcttcaactgttgagtaatccacatattttaaggcaacatatacatttaaataaaaatatacatactgagtataagcaaccacaaataaaattccctttaatccactaaaatcataaggttttttgataaaggggagtaaaatttctatagattttgtaactattccactttctccataaatctgaatacatgcaattaccataattactccaggaatcatcattggacttagtaaaagaatatgtatgattttcttatgtttatcacaaacaaatgtcatatataaggcaagtgatattcccataattccacatacgaacacagaacccaatcccaaaattatagtattgcttactacccttaaattattagtatttgaaaaatattctttaaaaacttcaaaagaatatccacctttaccttggaatgcttgtacaaaagtattgcctattggtatgataatatatccaatcaaaatccaaaataatatactgtataaaacaataaaaataacatttttagatgtaaatttactacggtttatttttttaatcatattagtcaccttgtagcacacctaaatatgccatatcccctacgtttaatttattgctattattcagtctattaagctcagttacttgatattttttcccatcatttgatactgtatattctaaaattgctcctagaaaattcttagattctacttttacttttacaaaaccactttgatttgtattttgcaataatatcatttcttcaggtcttttataaatataaggctttgtctctttttcaatattaaaattaacataatcttcttttccaatacagtttgaagtacctacaaagtttgctacaaaatcattcaatgggcttttgtaaacttctattggcacaccaatttgaagaactttacccttatccattacagcgattctatcagaaatagctaaggcttcttgttgatcatgggtaataaataaagtagtaatacctgtcttttgctgtatctctcttatttcttctctcatcttgattcttaaagctatatctagattagacattggctcatctaataaaagcatagtaggctcagtcgctaatgaccttgctactgccaccctttgttgctgtccaccagataattcatcaatcttttttttcctaaaatctttcattcctgacagctctaaataattatcacatttttcctttataatttttttagacagcttttttattttcaatccataagatacattttcttcaactgtcatatttggaaacagtgcatagttttgaaaaacagttcccatatttctattttctggttctaaattggtaatgtttttatcaccaacataaatacttccagaagaaggttttataaatccaccaattattcttaaaatagtcgtttttccacatccagaaggacctagtaaagtaaaaaactctccttccttaatagatatattaatatcatgtaatactttttcttttccataataatgattaatttcttttaattctatattcttcatatcgtctccataaattatctaatatttataaatctctaaatatacacatgatgaatcatcatagattttaaatctaggaaactctattgccatttcatcatccttttctagttccctaacctttctatatatataatctatacctttaatctctgctattttcatcatttcatttttatcaaaaatcttatatctatcatatccacatgaaaaaccatcactagccatcataattttcattttatattctatatcaataaatccacttacacaattgtcaacggcctctttagaaaattccaaagtccaatatccccccacagtatttttcttaagtctattctctattataatcgcattacctcggcttttctctcctttaaagtaaggtttgtagcatctttggcttctttcataaaatcaaatacttttttatcaagttcacataaagtctcatcttttaaaattttcacagattcattattgttaactaataaagtacaatctcctaaaagtaaatactctatcttatctttataaaactttaatatagaacatgaacaagaaggaatatctattgcttctacttctttatcatctgttaatttgtagtactcttttgttatctcctcaatgccttctttaataattacttttaagctatcttctctttccatattctcatgaagataactattccaccaacttacataccatttggcatcactttctgtagagactaaatttttattatttaaacctgtagctccatcaagtacccatgccccataaggtgataaacctacgatatcttcgttaaaagcgccactacctttattacataataatttataatcactaatttttagttccatttttatctccttgcccatataaattgtacttttactataattaaaagttttgcataataaaaaattcactttatttgagagactatgtctacaaatcactttatatagtcaattacttcatcagttactcaaaaactattttatttaataagtatgtattagtatcattttgttgtatgaattatacaaaattatgagatactatagtttccttatacgtaaaatagcgaggaaaatcctcactatttttgtatataatattaaattatttaattaggctattttatagttttattgttatctattatatctgtttcccacttttcaatccagttagactgattttttccaattacagaccaatctacatccatagctttatattcttttgacatccactttggtgaatctttaagtgcagaatctaatgttggaatacgattaaaatcatttgcaaccatagcttgaaccttagcacttccaacaaaatctacaaatttagctgctgcatttggatgtggtgcattttttagagctgctacacagtctgtgattactacagaaccgctctctgcatctacaacttctaatggcatattatttttttctttattctctattatatcacttaatactgcaacagatattgtagcttcacctttacctattgctgaatacatgacacttccactattgtagtaattctttatattcttatttaaatcctcaagatacttccaagcttcttcttcactcttagtatttgagtagtaattgattaagttactaatagtagaacgcatagatgatgataatgaatctctagtaactattaagtctttgtattcttcttttgttaaatcactccaatcttttggcgctttatcagctgataatagttttgtgttataaaacatcattactggtgtttttatagttccataccaatatccatctgaatctttgtaagacttgtctaattcattattccagcttggttcagtcttttcatataatccttcttcttttaattgcatgtatgtagatgtatctccaccaaacattatatctgcttgcggattatctttttcacttctaacacggtctgctagttcaccttttaagtttataaattcaacattaactcctgtttcctttgtaaattcttcagaaattgctcctagcatatcctctccatgtgtagtatatactactaatgtatcctctaatttatcactttttgatgtgttatcattgctacaagctacaagtgataataacattgctacagttaataaaacaactgctatttttctcttcatattgattcctcccccatattctccatgttcattttaaatgttattattcttgcagtcaatgattcaacaacaatctatataattgtatttttctataacagcttattttattattgtttttttctataattatacctatttttatacatataatttttttattaacattaatccatttttcaatctggatattttatttctttaaaacctattttaaatattagtattattatcatttatatacataaaaaatgacctataaataggtcacctaaaataatacttatatagtatatgagatactttcttaaatcacttattatttttttatctagtccactttcagtaaatagtgtatgtatgtgtatggtttccattttaagtcttaattaaaagtgtgaactactgtaagaccatatctcatcctcacatctaagctttaaagttttatctattatttattaattggctgtatattcactaatttttatcatttacagtagtcttcttatcttaaaataattacaacctaactttactcatacattatattatttataaatatttttaacaaaattaataattaaataactatattttattaacaatcttataaatatttatatcctatctactaatcttcttcaataaattcaaacaaattttctactgtggtcccgaatactttagcaatatccatcgctaactttaaagaaggattatattttccattttctaagtgtacaatagtctcacgtcttaccccaactgatttagcaagttcgttttgtgtcataaggagtttttctctatattctttaatttttgttttcatcgatattgccacttagttacatatcccccttttatcaaagtatatatacaaaattaatttagataacgattgtataaataaaactgcaataagaattataccagtatccaagtttgatatatttatattacttatataaggtgttgcaaagaaaatagctattataactatagaatacatcattattgttattgcaatctgattaacctttgatagtataaatttagatgattcatcaactaaatcattatattttttattataaattgaatagcatccaaagactattaaccagctcagtcctggaagagatgcagtacttggacctttaaaaatatacttagtagctaatacagctataaaaagataagttattacaagtaattccaatatgagttttgattttacaccagtttctgatttagacatataaaatccaccttaaaggttatatatttataacacttcatgttataaatatataacctttccaaataaattgcaagaaaatattgtaaatacttaataatatttttacaaatatagtccataaaagatttcataatagacatctaatggttacaaataatattataaaattacttttttattcactcctatagaatcaacgctctaaaaaattcttataccataaaaatatattctttagtaagcagtacagtactagattagtttattatatctattgtttcaatcatatcatttaccaactattatcctaattaatataagatattgaaatgtataattatacagcctaagttcactccaatacaccctcaaaaatatctctttttttgtggatgaagtacagttggggatttcattactaaaataaaaaatactagccaatattgactagcatttacaagtatttctaagtatttcattatttatttttacaaatcattagacacgaatctcaagattaatacacaggattaattcatttcatatacaatcctaggttttcatcaaaaatatacgtcactttactatcccatgatataatacaacagaaaaaactacaatctatggtggtttcatatattcttagttatattagtaggaaagaaatgtactccatatggaactaattataaattttattattggaactatcatttctatttgtgttggtataaatacaaattatatatatgataaaattctaaactacttatctattgccatagaaaaagtaatttaaaatttgaatttaaaattaaatcttaaatttatttattacaattcattagttcgaaaaaatatttagagtcatgcgtcttataaaggttcaaccaagaacttaatgcttcttctttaaaaacatctaaaacttttaaaacttgtactgtaaattctaatggtgcaattccagaagcagtaattaaattttcatcattaaccgcagattccattttataatatttttctccagaataacttagtatcaccatttttaaaaattctaaatcattacttgtatgatttctaaaatctagtaaacctgttttagctaaccctaaagtagcaccacaaatagctgcaactatagacctttgttccaaagcctctttagatttttctaatattttctcatgacctatagatgtccaagtatttccccctggcaaaattaataagtcattactttcaatattaagctcgtcaattgtaatctcaggtaaaacttttaatccacccattgttataataggatttttatcaactcctactgtaattacttttagtggttttaatccttttttaaaatatcttcctgtatttaattcagcagttagatatccaacttcccaatctgacatagtatcgaatacatacatatatacttttctctttttcatttttttgctccttctataattaattaatatacctaattgtaaaataacttaactgacatactctgtcagttaagttattaaatttgataatgattaattaattcgagtaaatcttcaaccattttatccctaaggcttaatggttcaattatttgtatagattttctataaggtataagtatattcggtacatatgtaaatattatctcttcttgaagtttaaatattgctttatttgaagtcctttcttttaaataatatcctagaagccaatgctgacataagttatccaatgcattcatctttccttctataactaatgatataagattatcctcatcttttgtttcatccataatccctcttataaaaaattcacttgctgaaaattcttttggcctattaaaagtatttgatgtttctatgacactactaattctatctaccctaaaactacgaatctcatttctcatttgacaaaatgctactatgtaccaattattattccaacgtacaattccatatggatttataatcctacattttgatttttcttcatgagctgtacgatagttgatttctacagataattcatttgctatactattttttaactttttaagtacagattctatggatatttttccagttggttttattacttcaaaacctattaaatgttttgttaaagtttcttcttgtttttgatttgaatacatttttaactttgaggttgctttgtctagtgtgtcatctaagaaacttccctcttctttagcaaatatagctgcatgaagtaacgcagtttgttcttctgtatcgaaaaaaagaggtgctttgatgaaattattcaaaagtgtatatccaccattatgacctgtatctgaaattataggtactccactagcagataatgcatcaatgtgtctgtagacagttcttatatttatttctagtttttcagatatttgttttgcggtaacttttttgtctgagtttaacatccataatatggacatcatattatcaattttagccatatagttttaccctttcatatatgttttataaatttaattatataggttattagattaatttttataaaaaaagggctatcgcacgagcacactaaatttgttctgtaaaggctccttattcttatctagttttttaactatttatcttggatacctttatggtacattaatccattttctaagtgtacaatagtctctcgtcttaccccaactgatttagcaagttcattttgtatcataaggagtttttctctatattttttaatttttattttcatcaatattacaacttagttacatatcccccttttatcaaagtatatacaacactaatttagataaagactgtataaataaaactgctaagagaattatacctatatccaaatttgatatattcaaatctcttgtacaataagcttcaaagaaaatagctattataatcataaaagtatactctttaataaacattacaatatggaactagattagtttattatatctattctatcagtaatatcatttactgactattattatcctaatgaacatgtagcaaatcacacactctaaaagaacccaatataccatcagaaaagcctctttttctgtagttatggtatgcttgatggatttcatcactaaaataacaagaggctatcgtatgataaaattaaatttgttctgcgatagctctttctacttgtatacttctattcactctaagttcacatccctctggtcttataattctctttaatttttcttttttcatgaaataacttagatacttgtaagtttttagtcctattttcaagaggagtcttactattattacccttaataaagctgcttttgtactgacaatcacgaaattcttcacatttatacacaattttaccccaagagtcgtaatgagtcacaaagtaattcagtttctacctgcctcactgatagtaatcactttatttgtttacttgttatttatattaaactaaatatatcctcttgaattaattcttctttattacctatataaaatttactcatatacaccaattcatcagttttattttgcttaatctcattaatatccacaaattctttattagaagtagttttttcaactgtcattaaataaatcttattaaacattgctcttatagaagcatttgttacatgagtataggatataatttgaacgttgaattttttagcaagttcaaatatttctttaaggaaatcttgctgcgacgtttctccaaaaggattatccataagtagtaccttacccttatatttactttcatcaactattgcatttctatcatatcttttatattccatcaacaatattgtcacaataaatgagatacaaaatctctgtcctcctgttgtttcgttattaatagagttccactttatagtttcatttctatttatttcatattttataactgatacaggaattctccctatattaagagtcttatttaaaatataaaaggtatttattttttgttcaacatcacctaggtttgcttcttctacaatttcatccattagcatatctactaagctcaaactattttctattttatcagatttaggtagtgatatgttgaataaggcttgtcctttatgtttaccaagtttatttatgattttaaattcatcaatacagtccataacataatcttttatttgccttgatattatagtcttttcttttcttagttgttcgctatgtttttctaatttgcttatttcttctcttataactagtaatactatttctacttgttctttttgtcgagagtaattatctttatttacatttaaagtttctataaagtttttgtatttttccatgtgcttataattaaattcttttatttctaatattgtatttttatagctatttatagatttaattaaattatattcaacattttgcagttttgattgtagttttttactttcaataaaaatatcttcaggttgataggttatagcttttctttctactttatatttctttaagtctcttaattcctgttctagattttgacaagtagttctattaccttctataatttcaccaatatcctttatatctttttttatatctatttttctttcttcaaaattaaagttcactattaagctagtagataaaggttcttttccattaaattttttaagtatctcctccctcttagtgtttaatgaaccttgatttttatctatgtcgcttttaatactatatttaagttttcgtagttcatcaaccttacttttatttaaaactattcttttattaagttcttctattgtgaataatataggtatattttcaaaattatcactactaataagttgtctaaattcttctaactctatagtaatactctctattctttttaagcaaactgagatttcataatttaatgtttcaatctctttttttgtagggtcttctaagtatttcttgtattttatttctaattcttctagtttagcattttcaagtttaataggttcataaatcttaaatttatttatcttgctttctgtatcatctatatgcctatttatcctatctttttctgaatttaaattaaatatattaacatcaatatcttctattgattttttaataacttttttttcttcttcgattttttcaatacttgtttttaacttagttatttcatttttattttctaaaattatagaatatgtatcttgtatatttctaatgtccttcaatttattaaataatatattcttgttatttaatagcttttctttattttcgtaaagttctttaattttattagataaattcttctcattattttcattactcttaattttattgtttatttcaaatataatttttttataattttcaattttcacatctatggataagtcttcagctgtaaaatcaattttattagttagaagtttaaattcttctaatatttcaatttctgctttatattgctccactttatctcgaatactatttatttgttctttgattagattcatatccttttctcttttttcaggatctaaagctttgttatcgaaagaagatagtatatttaatccattactaattacaaggttactagatgtagttataaaagtatcttctatgttatctcttacaaatataggcattgagattttagttttattttttaagtttatttgcttcagtttttgatactctttatttgtaattattatagaatatggtagcaatggatttttagatatgagattatttttgtattctaaatctccatctaaggttaatagatatttcatgccttcaataggttttattccatttctttctagatctgttaatatttcttcttcgaaaattatatctttataattttgtaaatcttctagctctttttctaattgctttttattattttctaagtcctgtacttgaagtttcattttgttaagctcttgttttacctctttatatagtttagtagagttatctaattcattgtctatttcaaatcttgttttaatgattttatatttttctttaaaattatctatatctttctttctagtttttaatacttgcagtttcatataagattcatgattatctaatttaagattatttatagcttcatttatatcatccttaagtttattcgattcttctatttgcatgactttcgattcaagattttcttctattgattttacttttatatttaaataatttatatacctagtataatctattacttcgcctaaaaaattattagaaataaagcctttaatatcagtgttattaagtttaaattcatgtagttgattattaaaatcacgttctttgccttctatatatttaatttctgaatttttacttatcaatacttttgtgagcttacttttgtcatcattaagttgattctttttttcttgtatagctatattgttgtttgtattttctttaagtttttcattatttataatactttcttcctttaaacaataatgaatactgctacctagacgatttataatagccgttatttcttcttgatttacctcttttctttgtttttcactttctttttctatcttatctttttccccttcttctagccccttcttttttcttttgaactttgatatatttaaatattgttcatctaattctagttcttctattttatcatttaattcatttttggctttatcaaattctacctgagtatcttgtatctctttttcttttctaaaatactcatagctatcttcttcatattctactatcttaaattcctcttcttttgatgctttcattttttgatactgttttatttcttcatttaattcattgcgtttattttctatatgtacatatagattagctaattctcctaatacattatttttatcttcttctatgaataggatcctatttattttattttgtaaactttcaactctaatgtttaaatctctatagtttttataatctgataatttttcattcatgtctataatattatttatacactttcttacttgttccttaatttgcaatattggagcgaattcttctgttgttaagcttgtctctattaaaggtaatattttatctcttataagtttttctgaagtattatgttctttaacaaagtctgatagtccaccttctttgttattactattaagttttataataatttctttccattcactttggttaattccatattcttctaatttttctctatgttgttttcttaagtaattattaaagaagtgtactttgttttttccatatttatctcttagcatttttatatagtcttgtgaggccgttaaaggttgtactatccttatacctttgtcattgttttttaataaaggtatattatctatatcaacctccatttctttagattcttctataataaacataaagtatttgtataaatcgtcctttttttctttcccttcttctttagatgatccagcctttttctcaaatcctattcccgttaataataacgttttaccatcatctagcaaccattcagtcattgagtataatggttcttttttattatatattgcagtaaacggtttggctacatccgatagtggacaaatactttgtatgatagtttgaatactcatagttttgcctgctgtattttctgcttctacttgtaagttttctccatacagttccatggttctgttgctaagtattctttcttgtcccataccaaatttaaaatttataattttgtatttattaattactggcattaatactttccccttttcttaaaactagtttttctattaatactttcctttcttcatctaaaaaataattattcataagatcaagaaatcttctagttggttttatcttatcttcatcctcaatgtgtacaattaagccttcattttttaagaaattaattatttttctaataaaccctatttggaaatctgctgatgttgtttctattcctttcttactagattcgtcccactttcttttactttcccaatagttctttaagatagttatattaaactcacatgatttttctatttcttctagattatcacgagctattgaacgttctaaggattcttgtactaaatccagtaagtttaatacttgaatatatgatgctggtgctaccccatttgtaaattcagaaaatattattgtcattatcaaatatcctaaataactatcttttaaatctttccctaataaagattctcttctatagtcaaacccaaaaatatcattgtcattatttggtattaagtataaggtatctgaaattaatattatttttattttagatacttcacaaattgcctctaaagcataccttacattactgttatttatataagctaaaaataattctttagcttctttttcttttaactcactttttttaagtaatctataaaatatttcattggctattttatagtcatttaaagatatattcattgtatttccccttatatttagattatttcaaattttatatttgctatttctagcttaactgcagtcatagtttctaaatttatttcagtatttattttcatttcatcttcaaatattttattacttttaatatggctaacgctatttaatagttcaaaatcttctactaataaacgttctattaatctttcaatttgaaaatctgtatttggtgagaaggcactattttctaacattctgattatctttttgatattgatactttccctttgattagcgaagtaaattattatatctctcatcaatttggagtctttagttatttctaagtaaataactttgtcatatttcagataattttttagaaattcttctaatgtaaattgtcctttttcaagtccatatttaattaagtatttaaaaaaatcaaaatagtaattttcacaataatttatacgttcctccttctctttattttcaataatttctaactcgtctttattaactatttcattttcaatttctctagtatttaatagtttctgttcttgatatgccactccaatattaaatcgatttggcaactctactttaaataaagatatatataattctcttattatcaataaaaaatcactgtctttttcaagtctatctaagatttcttccttgaaattgaatcttttaattactggagttgttaatagttttttaagtatttctttaaattcttctctaaaatcttgaactctagataacaaatttgtggctgtagactttgctaaaactattccatctattaattctttcatttgtaatagttgagttcttatattttttatcttttctttgtctatatcctcatccttttccaagtagtcctctttatctttgattaatagttttacttctttttttaattcttcatatttgtccatttcttctaaaagtgtttctacagttgtatctattactgttgaatatttttcttcttttatatatagtatatttacttttattatttttatataattatcaattttctgttgatgaatctctaaggtatttattatatcgtaaatatcttcctttgcgccttgataatcacccttttctatccttaactttgcaatcatttgtgatatttgaatttggaatagttcatcatattcttttgttgataacaacaatctataaccctctgttgttaaggagtaggatagtctttcctgattatttatttttacatttttatcttctataattttaatactttcatctatatgtttttcttgttctaaagaatagtaggtaaatagatatactttaccactattggttaatccattaattatatagtttgctaaatcctttaagtcatcctctgaaagcattattttataatccatacgatttatttcttcaataaaatccttaatatcatctcttaaacagttctttcttctaagagatctatcaaatatataacacaaaacttgaattaataaattgtaaaattgaatgttgtcaaattctttaaatttatttctattgttagcaagagttgcaataagataataagatcctatacagtttactctcttattgtagccttctaaaatattaatcatttccattagttatattcctccaagtcgaatctatttagagcttcttgaggtatgtattttccttgtactaaaatatttttaatactttcttttaagtttaggttattaatattttctaatccacattcaaaattatctttttgatttttggggatattcctcaaggtattttcctttgttttatctatcatatgctcataagcaacttcaaataatcttatattattaatttcattggtatcttttagggaagtgtatattgataatccagttttatctatatctccccaatataaaaattcattttctttatttgtaagatattcaattgttatatcttcctttaatcctttaatactgttgattattttttttccttctccgtatataacagtatctattttatttttaagtatttcttttccttctaatagcatttttgttattgttatgtaagtgtctttattttctataattaatattttttgtggagatatacgatttattgataaatatatgaatggctctggtgtcttatatacgtttaaatcctttattagatctatttttaagttttttagtacttcttttcctactttactacttatgaatttctcatccttaaatatttcataagatctttcgttaatcgatattttctttgatagattatcagattttttaataagataactatttaaatccattattgcaactctattatttttatagtgtactaagttttttctataataatctatacttaatttatcacatattttgtaatttatttcttctaatatttttttatcttcttctgtttcttgttttattattctatactttgtatataattgctcatgctgaggtgttagatctgaggtttttattggttttattttattatcatttattagtttttttattatgtgtactagttctttatgctcattgattttgtatattttttgtatttccttaaggtatatataagtcttttttatttttgtaatcatacatgtttaaatcccttctttacttataactatattatacaccattttacaatttcagattatattgactgtacataaaatagtacatattagataatgacaataaaaaaactagaacttaaagaaaatctatcagcactagtttaagtattatttatatattttgaatctctgtttttatttattagtataacaaaaacttaaatccttaattgtagatgtcaacccaaaattgttccaaattttaattgaaaataagaccactcttcatttatatataaatagtaaattcaaaataaaatttcacatgaatttactattctgcgctataatgcaacagaagaaactacaatctatgaatgggtttcatatagtcctagttcctacagtaagtaggaactaggtgtattctatagaactgatgatgaatgaattatactcatcttaggagacagttaaaatatgtaagactatctaaaactaagatatcttcagagcaaaaaaatcgaagcaattgaatcatatttaaaaggtgagaatacagtaataaaaataatggaagaattaaatattggataaacgtacattcagagagtggatgcgaaattatgaagcttttggaaatgatggtttaataaaacaaagttgtaaattatgctattgtgaagaatttaaattgaatgctataaaatcttatctaaatggtgaaggatcttatgacacaatctcaaaaaaatataaaatgagatcagtttattcactaaaagcttggggtaaagagtataatcctcataagtagataaaagaaacctcgaagggagaaatctttatggagactagaaaaacagcattagatgaaagagttgaaattgttaaagattgtagagagtgtacagactaatgagagccgtaggcttaagttctgtttgcagaaaaaagaaatttagttatgttaaatgtacgccagaagtgatcgcggaaaatgtattaagtagaaaatttagtgcagataaaacctctcaaaaatggttaacaggtgtaactgaatttaaattaaccaatgggatgaaggcctatttaagcgcaattctagatttagacgatagaagtatagtttcatatgttattggaaagtcaaataacaataacttggtgttagaaacttttgataaagcaatagagctatatccaaatgcaaaacctatttttcataatgataaaagtttccagtatactagtaaggtatttaaatcaaaacttttaacacaaggcatgatacaaagtatgtaagagttgctcgttgtattgataatgctcctatggaaggattttggagaattttaaaagtggaaatgtactatttaagaaaacttgatacatacgaacaattagtcaaaacaatagaggattatatatattactataataattttagatatcaaaagagattaaattctatgtctccacttgaatttaggaaatatttaaatacagagatagcataatttattttaagtagctctaaaaaaatttaaatacctagggttttatttgacatgctcttttttagatatctgatataatttctttggctaattgttttcttaaagcgttcataaaaaatctcctttacgacatttgattatatttaaataattgccataaagaagatttttattaaccttaaaagcacaaattattttacattaccatgatttattttataacttgttaatatatttctaatagccttgtctgttcatttaaataaccatcattattcattactaaagtatttatttctttaattttatctctttttaaatttaatgattcaaatttattatcttgtattttattctttataaataagtatagaatcatatttttcatattagttgaagacgccttatattctatatctgctatgggtgaacaagatattatttttttaatatcttgtattaaataattattttccaagtctatatcataataataacaaatagaagccaacacaatagatactcctatcaagtatttactttgtctttgcttatcatcagatattaaacttgttgagaatggatattctatcttctcagatattttcagtatcatcctattaaactcatcaaacttatcttttaataactctaatttttcactttcattatttttatactgaattgacttatactctaaaaatttcttagaggctgtaactccatctctgatattttcttgtagcccattttctaaaatactaaatattatacatatttcttgatgatttttttgtttatcattacgagatttagttatgttatatattctaagtaaatctgatttgtaattagcatatttatattctgatttatctatttcatccttatatttatcttttattagagtatttataaatttacttatatacttactagtttctgaaaaatatgttgccatctcgatttcttgcatctctaatggttttgtatttctgttatatcttttaaataattctatttctatttctggattatcaaaaccatcaaattctagaattgataaatgacttcctaatattttaattttatcttttttctctaattctgaaaaccttttattatcatatagtgggtcattgcctaatatatctaaatttttaagtggatatttattcttaacatacctatatatagcattcaaacgatgctgcccatccattacatgtcttatttgcatatcatttacacctatttttacaagaaatatttcaggtattggtattccaattaaaagagattcaattatagaactttcttccttgtttgatgatttatatgtacgttgataatcaggactcataactattccttgtaaaatttccatttcatctatttcatctattgataatttcaagtacttttctcctttatcaataaaattcacaatatcttggactgatacaagaggtctgtttgatttaatattttttatagaatttttaaattgttctctcattataaatttccccctactatctcatcataatagaattttatagatttaactacattatctttatctggataaatattttcaaatgtaatacctaaattaaataattcttttaatatttcttttttagcatctttattaataactactactttacaatacttttttaatttttccttaaattcgcctttatcttctgatgatacttttaggaaacatcctttttgaaaatgtattctttcatttgaattccctacctttataaaaaatgatcttgatgaaaatttactacaattatctattgcagatgtatctgaataatttactaacttctcagatctttttatagtgtcagtattataagaaatagagtctataaagtacacaattgaatgctgttttgtatatttatagtcttctattgcaaataataatgatattaaatgagcttctgtgaaatctaaatattctgttggtagtccaaaatgttgcccttcagctcttaattcttcactcgatctattttttatttctttatcataataaattattttttgtttgaatgcttcctcgtattcatctgaatgtataccatagtcttttttatattttctatgtaatgatggtaataattcatacatacaatctttttgccctctagatacatagtcgcctgcgttatctagttcagataaaaatgaaacatactgactcaaatttgatataaatataacttctgattcaggtatacctatatatttagacatagtattttgtatattatactctttccacttttcattttcttcatatattttatttacagctttagatatatgttctatatttatatttaaatttcgttctaatttaatattagttatatcaactaagtcctctattttaacattttttaatatatctatatctatagaatttatttcacttttatcattagtatctataaaatatgattgctttaaatagcataagtttttcatatatagttcaaattcagttgaatcttcttcaaatttatttacctccataagcatacttttaatttgctcatctcctaattttgaaatatattcaatatcatctataaatttatccattacctcatataatacatcatcctgctcacttaaatcattactaattagtaatttattatcaaaaattttacatattactgactgcattttctcccccattaaaattatttttactctaacttatctatattataacaaattttaccatattcggttagatatatcgttttatttatgacaacttagatattttataaaatttttaagtatcatctattaatatatattataaatttaaatcaataaaaaatgggctaccacactagaaaattgatataccctctttatgggaagaaaaattaaagtcttagatgagataaggtaatcttaactacacattgtgttacatataaatatttctaacacacttaataattaagtaactatatttcattaaccatcttataactatttataatctatccactatccttcttcaataaattcagacaaattttctactgtagtattgaatactttagcaatatctatcactaactttaaagaaggattatattttccaagtgtacaatagtctcacaccttaccctaactgatttagcaagttcattttgtgtcataaggagtttttttctatattctttaatttttgttttcaccaatattaccacttagttacatatctcccttttatcaaaatatacatacaaaattaatttagataaaaactgtataaataaaactgaaatgagaattatacccatatccaagtttgatatatttatattcattgtatgaggggttgcaaagaaaatagatattataactatagaatatatcattatttttattgcaatctgattaatctttgagggtataaattctgatgattcatcaactaaatcattatactttttattataaattgcatagcatcaaaaaactattaaccaactcaattctggaagagatgcagtacttggatctttaaaaatatattctttaataaacattgcaatacaggactagattagtttattatatctattctctcaatcatatcatttactaactattatcctaatgaacatgtaatattgaaatgtataattatacaacctaaatgtatatcaatatggggctgttgcatgagcaaattaaatttgttctgtgagagctcttttctaattatcttaataggtatattttcaattgttttatataaagtttctgttctaagtaaaattatgcatgacaaataaagatataaaaataccattttttcagataatatttgattataaataataattttagaatatttttttaaatgataaagatatattccacgtttattttttactattttattgtgtagtctagaaacgttataagctatcgccacaataatatatccttataaaacattttctttaccttggcttaaaaatcttgtaagtttcatattttattttacttgagcgaaagctccttctgcttgtatacttctattcactctaagttcatccccctcgaggctcataattctctttaagttttcttttcttttttcatgaaacgacttagatacttgtaagtttttagtcctatttttaagaggaaccttactattacttctcttaatacaattgcttttatattgacaattactacactcttcacaaatgtaacatgttatttcacttttatatcctgtttttgatttcctatttattattttattagcaaatagttttttctcatttgtacaaatataataattattttcttcttcataatccatattgtcaatacatccaatataagttttatattttctagttttaataatttcataatttgcaggttttatgaaagataactgattattatgctctaaaaatgcatagttttattcactttcatatccaccatcagctattactttaggatatttaaacttagtatattcctctatagattttaaaaatggtattaatgttgtagtatcagcagtttgatttcctgaatttagccaaactatatattcttaatctacaccaaattgtatattatatgctggtttcagttgcccatttttcatatgatcttctttcattctcataaaagtttcatcgttatctgttttagaacaactatttcgttcacccattatatgaaggtttttagtagattttctatttccttttccatgaataaatgctacatttgcttcttttgatattttttttagtttctttaaatgatagattttaattttatcttcataaactattttaatgccaacatcaatctcacatttcaatatgaagtcagatatattattcaccattttagccatatttttatttacagcttttttccaaacaaaagtatatctattagcagatgactctatttttgtaccatcaataaatattgtgtcttttgaaatttcattattatctccaagaaagtttgtaaactgtgcaatcaagcttttgcctattagttaaaaatgtatactgcgaaattttgcaattgttgaatggtctggagtggaggtttcgcctagaaggtacataaaattaatatctcttttgcatgttctttctatttctctcgaagaataaatacagttcatatctgtatatattataactttcaaaaattgtctatggattactctatttcatctaattcgagaataagtcttatataatttttctaaattcatctcctcaataatttaacttaataaccttacagaatcatcttttggaatcatgtaatcaatatttagtggtagcttaaattgataattatcaccataagtagtataatcaatttgtgtagtattttgttttagcatacagttattatacaagaatcccaggttcttttgaacttgggatttatttttttatacaaaaaagagcgtagcactattttctagtgcgacagcctttttatttatataaccttctagttgtgtgctaattgtgtgcttttaagcaaaataaaaggaattacttagtccaaacataagtaattccttttattctattattttcattttcaaaattggtggagacgaggggagtctacaagtggttatttgattgttttgttggttttcgtaagtgtaggtatatagctatttagttatgatgttatactaatttttttggatattttttattatttatttttgtggttggggtattattggggtataattttctactttctaaaactcttgctaattcaataatataaatcaaactctcagttaagtttcttaatgaataagtaaatttacaactaatttagtgtaatctaaacttgtagtgcctagtcacaactctcaccccttcaataatttataactaacttagtgtaatttaaacctctctactaaaattacttccacatatagctacagaatttataactaacttagtgtaatttaaactgtacctgggtcttttatcttacttgtaagtgtacttctatttataactaacttagtgtaatttaaacattgcagataggtctgtgccatcattcgtgctgttacatttataactaacttagtgtaatttaaactgggatggattttgaagcttctatgtcaaatgtacaatttataactaacttagtgtaatttaaacgaaacctctctttaaaattattcatagaatttataaaatttataactaatttagtgtaatttaaacattgttgctagaaaacattaaaatacattacacataatttataactaacttagtgtaatttaaacggctggacttgtaatagttgtaactaaaattagtgaaatttataactaacttagtgtaatttaaacgggtagaatgaatcaaatagcaaaagtactttccggaatatttataactaacttagtgtaatttaaaccccaaataaaactatagtaattacaacacttgtagggttattaaaatagttaatttgcagtgaggcaccagtagtgtttttagctaaaaacaaaaattcagttataaaccttgccatcactaactcacagccatttacacatatttttcgctcactgcaaaattattctattgtaacatataaaatttgtagtcgatataaattataacaaattctcaataaaatattttaattagttatactataattctcttaacaatcaaatattagacctagtttatcattataactataacttgtaacaactatatctccacattcataaaacatctttttattataattgtatctttttacagatacatttacaaataatgaactcgcttctaaatacatttttttatcaatatacaacttgtactcttctaaaagacattcaggcacaacactaatagtatcattatttaacatatcattattagcagatttattccatacccctaacctcatatttttcattataatctctaaagcaactttatgtttattatatttatccatatctatatctaaatagacattatctaaataagatggaactttactctcatcaactatagaattatcattatgtattatatctgatattactatatcagtcctatttattatatcttcatcatatatattaagctttctatcataatcatatatataaatattgctcaactcagcattatctccccttctatttactctaccaaacctttgtaacaatgaatctaaaggagctaactctgtataaagaacatcataacttatatctaaacttacctctatactttgagtacctatcaataagaagctttcttctatccctttttctgcctgctctctatctctagtattaaatcgaccatgtattaatttaggattatatttttgaagccttccatataactcttgagataaatctactgaattaacacatattaatactctttttccttgcattaaatcattttctattttatgtatgctatcaagtattccttcacttaatctattcaatctatgtctaaatattaaatctttactatctggttcaataattgtacttatttgcaatctttcctgtattaacttttttaagcaagttggtatacttgcactcattatacatatttttacatttaagttttcttttaaatattttaaaaattccaatgtataacacaatactcttgtatcaaaacaatgtatttcatcaactataaatatactatcttttaattgtgatagtagcatttcaaatctcttacaagaaaatactgactttactaattgaaatatagtacatacattaatttgttttacactctttttgtatatctggtaaagttgttttatatcttcttcatcactaattttattcaaaaaatatggagctttactgtgtaacatacttacgcttatatttctattatataaattttcatataaagaatttatgcttgctgtataaggaagtatataatacactctcttacttttatattcattttgaactaggttactccaatacaatgatgttgctgtttttccaagacctgtcatagccattatcattatatcttcatttttatccatatttaaaactttttcttgtattgaattataacttacaccctttggtatactaaaatctttaatagaattaaatcctttatctatacttttaattcccgcagaagctatatggtcacaatattgcaagtaaccttttaataatatattttcaagttttctagtatcatcatttcttgctcttgatatttcctttataaatggtcttatatcttctacttcaatatctaatagttcctttaattcctttaattcaatttcataaatagaatttgttatttgaccctctagaaactttatatctttatggtgggttaatatagctaacttctgacctctatttaaatacttaatacttgctgataataactcatgtctaactcttcttgtgctactttcaatattatcttgaaagctttttactactttccctacatcatgacatacaattgcctcatataaatcatttttcatatcattagatatattatatatgctaactaattgattcattatgtaattcatatcttcattatgcttatctatacttgtcccatctgatttagctttatattcatataaattattcatgatatatcctttataaagtctcctttaaatattttaagtaactttcaaaagcttgatgtacatttgatattttcataaaatcatactcttcaaactcttcttctaaatacttctttatttgttccttttcattattaacttctatctcattaaatgtatcatcataaaatttatttattccaatccatatatcgctttttctaaattcttcattttgttctatagattcttttaacatctctacatctaagccattttctttgataataccctgaaatacattatttccccatgaatactctcccaatataacaaatttgggttttgtatcagttagatgatttgtcttattaccttctacacttaagtattctagtgattttaggagagcttctattcttttaaacttttcttctttatctaacttttcaactccaattgatttagcttctaaagttgtataatctctatgctcacttgctatatcagatatatcatattctcctatctttcctatattaagatttgctatatttgtatgtacccctgaatatacctcaacttgatatggcatactatctcctgtagttccacaaacattccactcccattcaacttttctatttgatacatttattaaagagttcatttgccatcttgactttctttttttagttatatttacttcatatttctttttattttttttatatatttctttttcttcatctgataattctttgtatacatcttcttctatagataatttttccgccatcataaacccaaatatatcatctgtcgcatatttaaatgggtttggaaccaattttacttgtttcccatctttagttttaacattttgttcataaccacaaacttgttccataaatagcttttgattgtatttttgacattgacttgagattctacttctgctccctatttttttagtataagtagaattcttatatgaattatttttcttttctacttcactactacttccatttaatcgcccacataaaacttctattgcatagcctatatttaacattctatttgaatttttattttccattttaaccctccataatattattaaattaaacttactaatattaaatttttaatctgtctaaagcttcttatatcatccaactcaatataatcctctgcttcaaatagtttttctccagttttttcataatacatttcatttaagttaactaaccagtcctcatatgcataaaattttcctaacattttaagctccttatatattttgtctatatctaagtcactagtttttaatttatccgttaatttttttattatatctattttgacttttttcaatacatttacctccctgtttaaaaaaataacaagttcatcaaaattcttttgttctttctcatccattttttcttccttttttaccctatatacttctctgagataattgctttctaaagtaccattcaagatatacctatccaaatgtaacttttcaaagtttgatagtagtgctttttcctgtaattttattaataaattcacatatttattttttattctatttacctgaatatcctgagattgaccagagttattaaacatatattgctctatatcaccattaaataagttatatttacacactagactttctaataattttacaattgaatacttttctttttctttctttgctcctaactctacatcagttaaattttctttttgaatatggaaagtataatcttccataaattcgcttgatgtagaattgtataaaaaagcatacctacttactctacaattcagaattgaatacatagtcaatactaaacaatatggacatacattcaaaccttgcaaattattggagaaattataaaatgtatttgcaaccaaattaggcatataacttctccctatattgtattctttatcttcaattttgactttggccttatattgaccacataaactacaatattcatctccttgatttttaacaaaaccttttaacttctcatttaaagtaacttttccttttggttgagttagcgtagaattgctaaagcacatactttttaaattagagtatttttcgcaacttacaaattcttcaattttatcactcattaaatctatactattctctatatcttgataagttatatcattaatatctttgttcagataataagccaacacatatagaccattatcaacaaatacattgtaacttctatccatattaagccctcctagaagttatataagttagtaaccccattcctatactatttttttcacctaatccacaataataaattacttcttgcatatctttattagcttgtacaaatatttcaaaatctgtatatccaattataaatccttttccttttatattagttatatatttcttttttactgctaatacatcctcaatatcaaagtatagttcaccagtatattctttattatgtataagcttatacttatttcctaaattatcatgtaatgctttataaaactcttcttgcattggatttaagtatacttgtttcctactttttaaatcatataaacttgctacaataggtgaccttactttataaagtgttatattattaaaatttttctttgaatcttcttctatatctgaaactttaaactctatattattcaatttaaatactttacatttaataaaaccttttataatattattcaatatatcatcatatccacttaaaattaatttgatttttgtttggggatttaaatgtattccctcttttaaatacttagcattttcaaacataattgtgtaattaaataatttaaatactttcttatccaccttatagccttcattgtgaagacttagtgcttttcttttatcattaatttctatagcttcatatatccttttcattagctcatactggtaattgtaatctaatacaacttcattatccactgtgagtatcaaatgtcttcttactaaatgcatttaattactcccccttttttccatttccataaaaaaatattctgttgctcatcttcatcataatatttaccatattcaaactcatcattttctcttaccattgaagaatatatatcataataaccttttttttcattatactctgtcaatgtatttattctttttatcattccatctccaatattaatatctgtatattgattgtatccaatagcttttttatctattagatttacttcaatttcacttaaagataataccttcgctaaacaattagtcttacctaaacatagcggctcattaaattctatatttttatctatgttagtatatatgataagtttaggattaattaggtattcaatgggacatacatcagtttgaaatctatcgctatctgtcaatgtttttacatttggattgatttctttatatatagtctgtaaatctttaaatgtaccatcatgatatataacatatcctaatataaaatcatctatttcttcaccatatatattttttaaaattccgacaactgttgatattggtggaatttcatatgttctttgtatcttgctatgcataggaattttaaagtgagccatatctccaattatttcgattttatttaatatcattttatctcctcaaatatttagttaaaatactccattttatttataaaattagacattcatttataaaaacctttaatttttaccattattttcctaaaagtaacaaatatataacttaattagattattttagtgaagtttctaaaaactttacacttaccttaaatcaaggttctccttcaaactttcaatatagtacttgtaattttctaaaatatttctatgtatgttcatttatttaacaataaaaatacatttctatggattcatcatacatgttagtcttaattaattttcatcaataacttaagatatacctaatcggttagactaatatacctcaaatacttaatttataaaagtagctgttatactttagcaactaccttttcctaataaattttttgattttttatattagtatttgttgttaactagtttagaatatatactttatacatctctgccacacataagcattatttactatcttttataatttgcttcaaatcatcaatactcaaaacattatctttcttcctgtgaatcattctatgacaatttgaacatattggcaccaaatctgttttgggatttatattgctttcttctccaacagaacttaatggtttaatatgatgaatttctatgtatcccttacctctatctccatacgttttttcgaagtcaaacccacatacaatacactttgtgccatgatattttattgcttctattctatttctggggttacgctcatactgtttcccataaacatatttaactttcccttcttttctaatttcagtttctaattctatattaatagtattaatgttcaaaggattatcttgacttatctcctctaatacatcgtcttctatttcagcagtaaaaatgaattctatgttaaaattattactatcaagttttatgaatcttattttaggtaaatttgtttttccttctattttattttctaagaatttctcataatactcagaaaatatacttcttagtaaatctctaaacttagatttccaaattattctacttcttggattctctaatttatccatctctataactgcactataataattatcattatatttaaaattcacatttttcttttcattctttcctaaattatttatctcaaaaaaatatcttatttctattggaactcctgtcccattatgttttaatgtagatttatcaattgtttttaaagctattttctcatctaataactcccaagagtcaactattataggatactcatttatatttctaatttctaaaagtatattaataatctgcttgaaatgtatctcatcttccttaagaacttcaattgctttatctattgtgtatcctgtaaaaatacctttatgatttttatttattcctaaatgatgcactatacccattgattgataacctttactttgttttgatgataaatctagtatctcatcatctatctttctattactcatattatttttaaataaataattataaactactttgtttatttgctctgatgagtatttattaaactctctttttctatcattaggctctaacttaggtattatcatattctcctcctcaattgattattttagattttaataaaattattgtatcatatatttattattaaaatatattgtgctatttatcaaaatacgtaaatcctacaatgtcattgattgcataaaaataaaagagggcatacttatcccctctttattaaatatatttattttaaacaatataattaatatatacttcacttaaaatattctagtacaacttattaataatctcgatttactatttaattattctattgagatacacaaattaattacttcaacaactctattataaattttgctcctgttttaaatcctaatttataactaagttctctttcaaattctattaatgaattaaacaaatcatttaattcaaccaacagatatttcttatcatcttccaaatttatttccaataactcattaatttttttaacctctttccaacattcaatataatactcatctttttctaaaatacttctatacatatgttcatttatccaataatcaaaatatatttctataatttcatcatacattttagtacctccttgactttcatcaggtacttaatatatacttaagttgctaggttagtgtacattaagtacctaatttataaaggtagttgttatatttatatggcaactacctttttctaataagcatttaaatctaaactcaatatattttaaatctctattacatctaattaagttttatatatttaccattcaatacttcttgaaacataatttatctattacttaataaatcatgcttcttttttatatctcttgtatcttcttacattcttcaaaagaaaacaaatttcctatataccaatatggtctaaatcctgactcaccatctctatttttggcaacaataatctcacttaaattagcaccaaaacctttttctcttcgtctcaactctcttatatcctcaattcccattgtcttgcaataattaagagcctctttttctgtaggtctatgaatatatataactgaattagaatccatatatatctgctttgagcttctcattactctatcccctttaggtctttcatccttcaattcatcatttaattgagcaagctgaataactggtatattaaaatctaaagtaatcttttttatttgccttgataagtcagcaaatttagcttctcctacttctttaccttcataatccaaaatttgcaaataatcaattatgactaagctaggcttagtactctttatttctctctttatccctgatactgtatttacagagtcatttatataaaggttattttcttgatttattatgcttaaagcttgtatatatttgactatttcatcatcatttagatttctatttttcatttttacaactgatattccagttagtgaggctatatttctaaacagaatctgtatatcactcatttctccacttataaaaagtactttctttccttgaaatattacatttctaagtatttgtaaagctaatgctgttttcccccttccacttttggctgctattgtagttagttcacctccatataaacctcctatagtatcatctaagaactttattccagtcttaataccttcattcatttcatcatttatatattcaaaggctctctctgatatggctgttatacttgaatccttttttattaatttctgattggctttatttatatcattttctaactgatatataagagtattatcatctatttctccaagattgaacttattgaatttatcaattatatttctatttttatatttttcaataactatactgacataactcgtgaaatttgatactgttgggactattgttgacaaactggtaatatagcttatacctccaatattattcaaatgaccttttctctttaattcttctgtaagagttattatatctattacttcatttctcttatttatttcttttatagcattaaatatgtatttatgttcctcatgataaaacatgtcttcatttaacatttgctctaactcttctactattgttgagtctaataaaatgcttcctaatattgattgctctgcttctgtatttttaattaagttgtttgaattatttataatataacctccttaccactttaattgtgaatcatctggattatatattcctgtctctttatttatgacaatttccttgctatgataattgccctctagtatcttggtaaaattacttgaattcattatccaatcaaaatttgctttccatcctgtattattatttccattcagaaaacttgttttactaactatatttataacctctaatacagcttctttatcatattctcttattattgaatttattctcctctttcttgtgtctgttagtttcttgacctttgaaagttcaatacaagttgagttaaatttgcttataatttcactatatataatattattttcattctttatattcttgattgttgttgattgattgttaatcgtctgttgattaggttgttgattttctatgttctcttggtaaagctcccagttttcaatagttatgactatatatttgtttgttgtttcgtatgttagaaaaccagcatttttaaaaaccaacaaacaacttctaaccatttgataactaactcctttaccacatctttcagctattttgctataagaagaaataaattgtccagactttatttttatccttttattatctataaaaacatgattttctttatgactagccataagtaatagagttattaatattacttttctttctggtttaatatctttccaaattgatttatccaacaactccctgtaaagctttatccaccctttattgctcaattgcaaacacctactttaagactataacttgataccatttgcattttcaataaaccaatcatccaatttgttttttattatgtatactcgattatttatccatatacaagggaaacctttatttttagagtgacataactgcctaaattttgattctcctataggataaagcttagatgcttctttacatgttataagttcagctttatttcttttcgcattttcaataattttatatccttgctttttttcttgtgcttcttcttcattctttacaataatgtttaaagtagcttgtaatgtctttaaaacttctaaattattattctctttcatattttactcctccttactaaaaaataattcttctactgttgtatctaaagctctagatagtttaatcatcaaatcattgcttggattattagccttacctgtttccaagtttgacaaataatatcttgatataccaactctatctgccagttcttgttgctttaaaccttttttaatcctaaatatttttaaattgattcccatactttttcctccttttttctagtttacattcgtaaactttacattttaattataatgtcgacatatgtgtgctgtcaataagaatatattatttttctgttctcatttgtgtacttttgggatatactttatacgaggtgataatattgcaaattggaaaaaacttaaaaaagataagaaaacaaaaagaactaacacagattcaacttgctgaaattagtggcatctcaagaaatgctctaataaattatgaaaatgataaaagaatacctagtatagataccttatcaaaactcgctaaagctttaaaaattgaaaagactatcttttattttgatattgaaaatgaagtaatgactaatgaagatgttttatattttttacagtctttattcccagaagaatactattcttttgatgaatttttaaatgctatttcaaatcttatggaagatgatgatattaggattacctcaagtttattgctaggtgcttggtctgataaagaccaatattataaacttggtgaaaaattagaactaaatgaaaatcaagtttataattggatactttcagattgtgtatctaatactgaattagatttttcattacatcctgatgatataaaagaaattattaaaaatgatgttcttataaaacaatcaattgatgaattattagatattggtctatcagaagaaaatatagaagcaatctatgattactttagtgaggcaacagataatgggagtaacattcgactaaaaaagttaatatctcaaaaagaaaatatgactattaaaaataatgattactttaaattattacaagaaaataatgaattaaaggaaaaaaataaaaagcttgaaaatacacttaaagaaataaaaaaactactaactaaaatataaaataatatcaatactatctaaagcaatgataaaaaactacaaatggagttacaattattaataaagcatatatgctaaaatacacatataaataccctactaatttattttatggagataaaaaatatactctaacatacattaaaagaattatgagtaagttagtatatgatatagataatctagaaaataactcctttatatgtgtaaaaatacaatcattgtttgatgatatatttaaggtggaattatgataaataatacaatcggagaaaagattaaacaatataggaaatcgataaatatgtcaaggaatgagctagccaacaagattggttgttcagttcatgctatagctaaatatgagcaaaatcaaagaatacctagtctagatatgataagaaaaatatctactgctttatcaattgccataaataaactcattgttgaagaaaatgatttagatactttaacaaataataatattaatttaaaagtatttgataaagagttggatttagtagttcacatattagaaaattatggttatgatataaaaacagactataaaaaaaagtttgaaattacagataatgcagatacaataaaaccaattagcttaagcttctctgacttcaaagacttctccaaaaatctaaattgggtgataaatggtcttgttgaaaattttatacaagaaaactctaatggtcttattgaagatgaggatgaagaatattagtattgcacattttcaaaatatgggtttacctattaacttttatacattcatagttaataaataaaaattagatatgaaaggagctaaaatcatgaataaatcatatataccaaaatacacacataaattccctacgaatctacctcatggagataaaaagtatactttaacatacattagaagaatgataagtgaatttgtatatgatatgggtaacctagaaaataaccccttcacattcccagaagtacaaacattacttgatggtataacagtaggtggacataaattaagtgaccaaaatcaaatactaaatataaaatcatcatgggattatataataaaattaagtaacaaagaaaacttatctttaaataaagatacaatttgctctatacataaaatagttgcaaaagatgaagctctaattgttggagattttagaaacggtaacataggtatagctggtactactcaatatgagtgcatagaagccactctattaaataatttatttataagtgacataagtatcataaataaaataactaaccccttagaaaaggctataataataaatttatggttgtcctattgtcaattcttctatgatggtaacaaaagaactgctcgacttacctcaaacctaatacttataagtaatgatataggagttctatcaataccagccaaacataaacaagaatacaacacattaatgctaaacttctatgaaacactagaagctgatgaagttataaaattcttattagagaaatgtattacattcttcgatggatataactataaatcatataaggagttgtttaaaaatggcaactaaaagagctaatggagaaggctctatcggaaaatataaagatggttggcgttctcgtataatgattggttataatgaagatggaaaaccaataagaaaagaattttatggtaaaactcaaaaggaagttaaagataaacttgatgcttataaaaaacaatattatttaagttctgatatttcagatgataaaataactttagagcattggttttacaattggttgtttgaatatagaataaaagatttaaaaccaaagtcatttgaaagatatgaaagcatctatcgtaattatattaaagatactgatttaggcaatgttaagttaaaggacttaagagtatctcacatgcaaaaatattacaatagattgcttgattccaataaaagtatacctactataaggcaaataaacactaaactgaaaacctgcttatcagaagctgaaaaacaaggtcttatacaacgtaattattgtactatggtaaatataccagttgagaaaaaggaaaataggcttgaaatattgactcttgaacaacaaaagaattttataaaagctatagaggggcataaattagaagtattatttttggttgctcttggtactggacttagattaggagaattattaggacttaaatggtttgatattgattttaaaaattctaatttaacagttaaaagaacccttcaaagaacatattttatagataaaaatggaaatagagagcttaaagtattagagcaagaaccaaagacatcaaattcttacaggactgtacctattccaaaagatgttttaaataaattgaaagagcataaagtaaatcaaaatgtggatatattaaaggctggagaattatatagaaatgataattatgtattttgcaatgaattaggtgtccctatagatgataaaagacctttaaggaatttaaaatctatattaagcagcttagatatagaacctataaagtttcatggtcttagaaaaacttatgcaactagactttttgagaatgatgttcctcctaaaactgtacaagttttaatgggtcattatgatatatcaataactttaaatatatatactcaagttatggaagataagaaggttgaagctgtagaaaagttggataaaatattttcattgtaaaaatcaaatacataaaaatactatgatttcatatagttaattacaaaacccaaataaggatacaaattaattttatattatcttgtatccttaattcgtatctagttttaactatttatcttggatagcctttatgatacattaatccattttctagcattaattcttgagccaagtatatatgacccttacagtgcatatctgatacaccctcacttataagtttatatgtttcagaagtatataaataatccatactttcttccaaactcttgcctgtctgattagaaaattctaatataatttttttatatagtatctgtaataatgttttatttgcttccataagcactatacctcctcttcacatctaaactttaaatatttatctattacattttgattagttatacatatttgttcatttggcttatagtattttaatctttttaaagcttcatctttttcaataagattatcttgatacagttctattgtattgtaaatcttatcatcagcaattccacctattataacatcatatttcatatatacatcactcatatttctacattctaatataaagtcaagccattctaaattataactattgaagatttttaccttgcagttttcttttaatttatcaatatctagagaatagctatttaaatatgcttttttaccccttttcttaaaacgttctatccagttaattgcctgtgtttttatactggttacatagaatccttttccaaaatctaaagaatctcttaagaagataatattaggcgtttttgccacacagtatgaatcatgatatacaattattacatcacgcccttttcttcaagcacttgtattaaatcttccactatataacttttactttgagaatgtagtgcttcatagcaaggtattatatagttatctaaaatatcagtatcatgtttaagaagtttataaactccttctgaatctatattcaacttttctgctaaagcttcaatgcaaaaaatagaaaattctagttttctttcatccattacaaacctcaactcctatccacttatataatatatatatttttattaattaataacttaaaccatcttatgtttataaaaatattatatcataaagtagatattaaaattctatgttacataatatcataaacaaataaagactagcatttccaaatatttcatcatttattttttaactcagggaagatataccacttgaacaatatcctcaactgatattttgatatattaaatttctattataaaaattttattctaattataaatcatatagtaatatacattcattactttataatttgaaacctcttacactaataaaatttgaaagtgctcattattcaatacaaacatgcctaaaattatattttaatttttacactatcaaaaacatatatattaaatttgacccacttaaatacagtaaattaatttctacaacatgatataattaaattatgacaaaagactttgatatttataaaaactttccaacagatgtctcttataagatttttttatataatcttaaattaaaaaactcattaatatgcccctattgttattctgataaaattagtacttataatgatttatttcattgcaatatttgcaatagtaagttttcaattacaactaataccattatgcataaaactaaactagactacagaaaatggctacttgctattaatttatttatatttgatgaaaatattagctatagaaaattatcaaaaaatatcgttgttaataaaaatactgcgtacaagatgataaaaaaactcaattatctatatacatattttaaaattgatattattagtcttataaatactaatttatctaatgaagagatactaagtaatatcttacttattaaaataaaataaaggatggtgttaaattggaatcaaaagaaaaaagtatattgagagcaacacattttggtattataaaaataggtgaaaaagatttaaattgtgctgtactagaaaatggttcaagaatcataaataaaagtacagtattcaaagcttttggaagaacaaagcgtggtagaaaaaaagatgaaattcgtgtaccttctaagcctaatctaccaagttttattgatgcaaagaatctatctgattatatttcagatgaattagaagatatgcttataaatacaataaaatataagactaaaaacggaagaattgtggaaggttatccagctgaaataatacctcttatatgtgatgtatatttacaagcaaggcttgataataaattagctgttcagcaagaaggactagctatagcaagcgaaattttagtaagaagtttatccaaaatagggattgtagcattagttgatgaagctacaggatatcaatatgatagagatcgtgatgagctgcaaaaaatattgtctatgtatatttctaaagagtttttaccttggacaaaaagatttcctgatgaattttatagacaaatgttcagattaaaaaactggacataccctagaccaagttctaagagacctggaatagttggaacatacacaaataaatatgtttatgatttattacctcctggagttaaagaagaacttcaaagagttaaccccacagtaaaacctgggcaaagaaaacataaacatcatcaatttttaacagaagatataggtaatgatcatttaaaaaatcatttattaaaggttataaccttaatgcaagcatcaaaagactggaaagatttcaatgtgctttttaatagagctttcaatctacctgtacagctcgaaatcgaatatgatgaataatagactatagcctttaacaacgctttaaatacttttaatttatattataaaaatagaattaacttatatcataaaagtacttattagtataggtacttttatgatatattatttaaattttatatataatatattgtctatatacaatagtcttgttagtattaaacttaataattctatgtgtttattatcttaacatttttcaattccttttttacatcttatttttttaaatacaattaaaaaatttaaattagcatcccacatagataataaatttgttctatacttatacataatcttataggattctgtatatcattataactagtaattactctaatagattaagtagcacttatatgctttaaacttctttatccttttaatcataagtttaaacaagttatatatttcctagattgaaataaaaagcataatataaaaacaattcatcagtataaaatatttattgtattatcatcaaattcactatatctctaaaagtattctttatatgttccatggattaatcaaatgcaccccaatataccccaaaaaaatctctttttctgtggttggggcacggttggtggatttcatctccaaaacaaaaaacactagtcaataaagactagtatttccaagtatttcatcattcttttttaaaaattggtggagacgaggggagtcgaacccctgtccgcaaatcttttccttgctgcatctacatgcttagccaacttcactaatatctcacctcacatagcgccaagtggcaggctctatgcttagccagtcccaattaatctacttcaggtcgagacacccctaaagtagttccctgcataatgacgtccagtcttagtcggcaggaggactaagagggacgagcagcaactaggctgctatcgcgaaattatcgtctgcgtttattttaaagttccccagtttttacgtgacccagagtaacacgacatgcagcctcaagttccaaacccacgtcgaaacctttacgcccccttgagtagtttatagtccagtagacttttcgcaaactttatcaccatttttattaaatttttaatgtatatataatataatacttttaagaataaaaatcaatgttatgttctagataataaagaattttattctaaaaaatacagttttatctagtttaatacttacctgtcatttctctttctatacgtctttgtgcatctttcttagccatatcttgacgtttatcatatagttttttaccttttgctaaggcaatctctactttaactttaccgttttttagatacaaactaagtggtataagtgaatacccctttatagtagttgctccaataagttttcttatttcatgcttatgaagtaatagttttctaactcttaaagaatcaacattgaatatatttccttgctcatatggacttatatgaacttgttttaaaaatacttcactattatctacagatgcaaatccatcacttaggttaactttgccttgtcttattgattttacttctgttccttttaattcaattccacattcataagtttcttctataaaatattcatgtcttgctcttttgtttgttgctaatatttttttaccagccatataaatctcaccttctttgttagaaatttattccataaatgttagaaatttactaaatatttaatgttgccaaattatttgactaacttgtatgataacatatttaggcattttagtcaatatttcactgatatattaagttagttaggctatatataattaagtaatataaagatatgaaaatagctaaaaaactacttcgaatatacttaatactaaactaactttaaccagtaacactgatttctaaatttcaaaacaaaaatattacatattataaattttctatcttctatcttctatcttctatcttctatcttctatcttctatcttctatcttctatcttctatcttctatcttctatcttctatcttctatcttctatcttctatcttctatcttctaaataattttaacatgcccataaaatataatacccacaaatgataaataatactcaaaatatctattgaaataactatacatccttaaataacttaacttaaatctaaacatttcaaaaacttcttaaaaatatgtaaaaatttgatgataaagtagcgattttttcaaaaaaaatgtaatatagagttatatcttataatattttagagataaattttatcatagttgggagaaatttgtatggatttaagcaaaaaagtaaaaattttagaaaatgcatcagatggcaaaagcgaatttgaaatattagaatttgaaaaacttgagggagcttctagcccattaatggcaatgggattatattttgctagagaagctggtttgaaagctagacaaattaagataaaattaaataattcatcaataaaaacagaagctggtgcattatactattataaaggaaatatatcttctgaaactaagattggtggtgttggaggtctttttaaaaaaggaatatcaggagcacttactaatgaatcaatgatgaaacctgtatacaaaggtactggagaagtttatttggaaccttcttttagacattatttatttatgagtcttgataatgattctataattgttgataaaggattattctattgttgctctgatacaatagaagtaaaagcatttacacaaaagaacttctcatctgctttacttggtggtgaaggcttcttccaaatagaattaagtggtactggtgtaatcgttctggaatgtgttgtacctcaaagtgaaattgtagagtatgaattgaaaaatggagaagaattaaaggtagatggtaactttgcaatagcaagaacatctggggttaatttttctgttacaaaatcagataaatctttaattggttctgctttaaatggtgaaggtttcttaaatacatttactggtaatggtacagtttggctagctccaactcaagtaatgtatgaaaaactaagttttggagcaatgcctactaatgataatatgaataataaagtttctaagcaaaaatagttgttttataaatatttattaaatcattattgattttataaagtcactataaattttattagattattattataaaatcagagtgtggaaatgtttatgtgtattctttaaataaaaatttccacattctgtaaggttattatacttgatatataaaattcaatttaggaacatagtctaacatttataaacatattaaggtaatgatttctcttggtaattattctcatatcttattctttgattatatttatcttattcctagcccttatgtcatattatatttcttatcttattatttataattagcattaacttatctaaaatcttgtatttttttaatagtaaagtttacatctatattaaaaagtttacatctatattaatttcataaaacaatcaaggtagtcaagagattcaactttatttgattttaaaaatttaagtgaatttgttcttatacacatctttttaaaattatatctgtagaaaatatcatttagagctataattaaattattaaattttagaaaatttattaaaaaatataagttaaattaatatttttaaagattcttttttataactactagaatactaatttagtagttattgtatctctaaagtttaagcatggatagatatacatttgataatttgcctataatttacctactacttggagtattggagcaaatacaatatattaataataagttcctaaaaccaataaattaactaatacacataaagatattgatgttgattatacaactataagaaacagatttaacagaatttaatcaagctaagaaattacatatatcgtgatgtttttgaattagaaggtaattcaaaattagtttatagtcttctgtgaatccaataaaaagtacagggtacaagaattgttagtaaaatttttaaagattttatggatagatataaatagttttacttattttgtaaaatttaaaataccattaattaccttaaatattttaataggaggacatatgaatttaaataaagttaaatttactgaagaacatgctattgaagttactaattggaaatatgaaggtaaatattcaatatacaacctacctccatgggaggaaattaaaaagaagaatttttcactatcaaaagaagataaaagaaaaaattttataagttttataaatgacaataaagaattgataggttttataaacttattggatgaaggaagttatgtattctttggtattggtataaaaccagattattgtggaatgggaattggcaaagaaataattagcctaggattacaagaatgtagaaataaatatagtactaaaccaattgtattaaatgtaagaacctggaacatgagagctgtaaaatgttataagtctcaaggatttaaaatagttgagactcaggtacagaaaacgcatttaggggatggagaattttttgttatgaggtatcaatagtttataacactagtcatattgctaatatgacaattaaaatgaaaaaatacatgtgtgtatgtcatagcaataagtgtctttgaaatataaatttgagagcctttgataaaattcggtatacatatatattttatactacagatatataaatctatctacatacataaagagattgtaagtaggtttgtgtatataaaaataaatttatatttcataaatgtactttttatttgtattacctttattttatctaagctctcattttattacctaatcttcctttttattggttttattaagagagatgcaattatcaacacaacacttccaagtatcagccaatatttctcatcaaaactaccttgactcatagacattataaaaaattttccaacatacttgcctttagtcatcatatttaaaattaaatatcctatagatatcatgtaacctatgattgtattattaaataaatttgagaaaaacattcctaaacttcctataaacatagctgatgcgaaacttccaataatatactcaactactggaaaattacatccaagatatattaaaacatttacaaaacctatgattaataccactatacctataattgacatcagtatcctaattaattgtacaataacttgagataatgattttgaagatactatctcatcaatttcttttgattgctctagcgaaaatacaggtaccaacattactatccctattattgcaacataattttctaaacatatagctgttgaaattctgtctaaattagctactccttgtattagaggaatcatacatagcaatataattgaacatattaaattagttaaagtgcttaatttgaagttttcttttattagaactaaacagttttgaaaactttgcccaaacatcaagattcccccttcttttttgctcatataagaatatagctaacaaaacaagcaccaatgctcccaagcttatcacaattctattaatcataatttgattgaagttttgtataataatatccccatttaatacactattatgtcttatcattagccccattgttgaataatcacctttgagtcctgtagaatttatactgtaaagccaccaaattaattgcacaataattgctactggtgtatctgttaatatagtaatactcattcctacagctgtaactatcataagagttggtagtatccaccataatgtatattttataaatgctaagttatcaatagatatacctttatctttagcaaagaaaatcaaaggaagtaaatctttcatacctaaaattaatacaggcaatatcattataaagacaagtgcaaaatatcttgataaaactattttgcatgaagatacttgttttgaataaataatctctctcattcttgaacgcttatctttaagtgacataaaaactgccacaaatactggaaatatacttaaaactatacctatataatcgcaaaaaattcttgcatacccattactaactttatctttttgtattgtatagttgtaattcttcatagcttcatcataggtaactggaactactccaaatctttgtaacttgtcaaaagcatatgcagaccctcctcctaaaatgtcgtctactctttgcattatttcttcaaatctttcaagagatactttagaataatctatttttatactttcatcagttttccaaattaaatttatttcgctaatacttttaccagttatttcttctatatatttttctatggtcttcgttttattttggtctaattttatatacttaactacccctgttggatacgttgtatatgtgtttttttgatattctctaattaggtttatagttgcatttggaatgaccttttctgttttcatagattctttttgaccatatggatattgattgtgtacagagtaatattcgtcaatattctctactttttgtggagcaactaatggatttccatcattaggaatatttttacttacatcatttgaaactgaacttccaagttgagaaatatagaaaaaaactaaaactacaataaaaatataatataccatactctttaatatatttttacattcttttataaatagattcatatattatctcctcccattataagcatatagccatcttcaatagttggattacaatttactgctgtctcaaaaggtttatcatctgatataatcctaagtatagcctttccaccatgagtcaacattcctataactataaatctactttttatattttcaatgtcttttttatctacttcaatactatatactttcccttcagctagttttgctaatgcttctgttgagccattgtatatgacttttccactatccaatatagctacgttttcacatgtagcttctatatctccaacaatatgtgtagataaaataacgattctatcatttgcaatttcgcatagtaaatttctaaatcttatacgttcttctgggtcaagacctgctgtcggctcatccactattaaaactctgggattatgaattaatgcttgtgctatcccaagccttctattcatacctccagataaagattttactttcacattttgataattagtaaggtttactttgcttaataactttgctataatttttcttctttttcttagtggtatatccgataaaactgctaaataatccattgctttatatactgtcatgttaggatacattgaaaaatcttgtggcaaataaccaaccatatttctaatttccttagtattctcaataggaactccacacatatgtattgaaccttctgtttttgataataaagtggctaaaattctcataaatgtggtttttcctgctccatttcttcctaaaagaccaaacataccactgtcgatttcaagatttatattatcaagagcttgttttttcccaaatcttttactaagattggatactgctattttcatttccatatataaatacacccccagaaataattttatagaattttatttttataaatttttactgtattttcataataaattctaaaacttaagatattatttataaatttctaaattttttctaaagattttaatttttctgtttttaattaaattaaagtatctttgtttctgaaattttttaagtttatgaagctataatttaatatatatttattttatttgtgagtctatttttatatataatgaaaaatgtgataagtatccaaaagaattactggatataataagatagggtatttagccttttaagataaataaaaatatctgcaactatatattgcaaaaatttaaaactaatttatatatgctaatataaatatttataaagacataagacaaatttacctacagatttaaatttaacttatatattttaaaaggctaatataatatgtattttcttctatacaatcaaaaggcttcatatctaagatatgttatgacactaatattcacaattttttagtaattatcacattataaaaaatattacagctagtccatcatcagatgcttcttgtataaactttttaagctcaattagatttgcccatacatattcaaaaaaatcatcttcactctcatcattcataacaggataaatattattttctaacatctcattaatattaaatctttttctaaatgcttgttcttccaaactgttcattgcttttgatagtttttttacatcatttgctgtaatcaacatgacaggaaattctccatcaatttccataagtatgtttccacttagtactaatttgctaaatatattctcatcatctccaccaaaaggacaacctgtcaaagtaaagtgaatggcatgccatgctttatcaatattgatagtactattttcgttggcatcttcaaaaacaaaatcttgtaaattttcttctgcttgctgtaatttaaaaacattctcttcacttattttagtataacatcctatcatccccataattacattcctcctaagtagcgtttttttaattgtaacttataattaaacttagttacaataaaatatattgagaaaagtattatttcatcttaaatttaaatacctatattatcaactaaaattctgtgtttatagcgtaagtattattattttttcctaaaaattaaatgaatcagaagttctataggcaatattgactataaataagaactattacttttaaaaaaaatttaagaaattatactgtagaatcatgctctacttattagcttcaaataaaaaataaatcatgttctcaaattaaataataaataacaataaatttaaattttaaactataagagtttctgaagtgttaataagcataccaataattatatgtgtaagaatttgatttaatagatatgaataatttttacattaattataaatatattaacctattattataaattctataaaaagaaaagttatcttaaataaaaaataagtgtatcttaaattttaaatgatacacttatttttatattgaaattatattttttaatatctattcttaattaggtatttttaaattatctgtttacattaaatatctcttaattacttatctttcagctagcttcttctattaaatgtttctcaattacttatttttcaattagccacttctattaaacatttcttaattacttatttttcaattagccacttctattaaacatttcttaattacttatttttcaattagccacttctattaagcatttcttaattacttatttttcaattagtcacttccattaaacatttcttaattatttatttttcagttggctttttctattaaatgtttcttaattacttatctttcagttagctctttctattaaatatttctcaattacttatttttcaattagctactttcattaaatatttcttaattatttatctttaagttaactatttccattagatatttcttaattacctatttttatcatttattttatagagtattgtgcactatatatttatacatatcataaatactacaacttgttatctcttattttagctgttttatctactcctctattttttcaactatctcaaagtcaatttctttaaaatctacattaacactttcaacctttatcttaacaaggtctcctatcttatatgacttcttagttctttctcctaaaacactataagaactctcatcataaatatagtaatcatcattcatatttgcaagtcttatcaatccttctatagtattatctaactcaacaaatattccaaatgaagttacgctagatacaacaccctcaaattcttgaccaactttatccttcatataaagagccttatagaaatcatgtacatctctttcagctaactctgcctttctttctttctcggatgattgaacagatgcataatccactatagtagtaagctgttcttgtctttttccacttattttattatttaaagattcttttattattctatgaatttgaaggtcaggatatcttcttattggtgaagtaaagtgacagtagaatttagctgctaatccaaaatgtccactacattctggtgagtacttagcttgttttaaagaacgaagcattatagtactgatagctccttcttcttttttgccctttattttctctattataccttgtaatgcttttggatgtacttcctctttatcaccttttattatatatccaaatgtagatataaacttactcaattcttccattttttccaaagatggtgtctcatgtattctatacacaaacggtattcccatccagtaaaaatgttcggcaattgtctcattacttataagcataaattcttctattatcttattagatattcttctttcatatggctttatatctacaacttcgccttttccatttagaattatctttgcctctgggaaattgaagtctatagctcctcttttttctcttcttgacataagaatcttagctaaaatttcagcatttttaaaatcttcaacaacatgttcaaaagtctttttaagtttttcatcatccttttctaatatatcagatacttctgtataagtcattctagcttttgaatttattacagattcacatatttcatgtttaaccacatttcctttatggtctatttccataaatatagaaagagttaacttatcttcaaatggatttaagctacatactccatttgaaagagtttttggcaacattggaattactttatctactaaataaactgatgtagctctttttaaggcttccttatcaagtttatttttctctcttacataatgtgtaacatcagctatgtgaactcctagtttgaagtttccattaggtaatacttctattgatatggcatcatctaagtcttttgcgtcatctccatctatagtaaatatgtttaaatctcttaaatctcttcttctttttatctcttcttgaggaatctcaacagctacagcttctgcttcttgcaatactttctttggaaattcttctggaagaccatgttctcttattatagaatctatttctacgcctctttcacctttttgacctagtatctctataattttgccttctggttttctatcctcttgtggccatactgtaatttcacatactaccttatcattatctactgctccactaaaatgttttttaggtatatatatatctttagtaaatttcttgttgtctggtgttacaaatccaaaagttttacttgattggaaagtacctactattctagttatttctctctttattacttttactattcttccttctgctctcttttcttcagttgcaggtactactatttctgccataactctatcgttatgcatagcaccatttatattgtcacttgagataaataaatcctgtgtatattcaacatcagattctacaaatccaaaaccctttttgtgtgatacaaattttccaacaaagtatcccatttgattgggagatactatttttccttttttagtaaagcagatataaccatcttcttctaattcatttaaaaaattataaaacattggcatttctgatgaatgtatatcaaatatttctgctaattcttctttttttagaggattatatgcactttcatttattaatcctagcaaactttctttaagtcctggtatcatttttccctcctgttttacttttcattatattattatttatattgtcttttatatttcttcagataaaacattttttacttatcacataattttctatattttcttattattattacaagttaaaattacttatttatatttttgatttaatgtaagctttgtcatactaacttcaaacaaattatgatgttttataaattatttgtaaatatcattataattacttaagttattctttatcataattgcttaaattactctttatctcataattatacaccatcaaataggattggtaaaatattcatctcatataagtattactatataataatttattctattagtatactcaaatcatgtaaaatttatataactcaattaattttttaaatacaactttataatataaaacttataataaaagtaaatttatatgttaaatgaggttgattttttattattttttatttatgctagtactaaagacttgcaaacgttttttgacaagtctttattttgtctaaattaaacaaacttttttacaaataaatacataaaatttaaactaatctatttattggaggagataaaattggaagaagtaattgcaaaaattattactatagaaaatggattcaaagaaattgaaaacattgctaaaaaaattgtaaaaaataatgactcaaaaaagtgttattatctatcaatctacttatataggtcagaatattatcaagtaagagaattggctgtgtttatacttggttttatatcagtaactatttctgaagctttgttatttttaaaagacaatgtgagtaaagatgaaaactggagagtacaagaaatactagctaaatcatttgattattattgcagtgaagtaggatatgaaaaggcacttcctgttataaaagaatggcttaattctgatagtccaaacataaaaagggctgtgacagaaggtcttagaatttggactagtagagactattttaaatctaatcctgacgttgctatatcactactttctagtttaaaagaagatgatagcgaatacttgagaaagtctgtaggtaatgctcttagagatataagtaaaaaatatccagatttagtaaaaaaagaattagattcatgggatatatcaaataaaaaagttgagtttgtatataagcttgcttcaaaatgtatcttggcaaagtaaaatggaggtgaacttatttgaaacttcgtgatgagtatacttgcccattagaactaacacatgatatgataaaaggcaaatggaaatctattatattatggagattacgcataggaccaacctccttatcaaaacttgaaaaggaaatcaatggtattaatcaaaagatgttacttgaacaacttaaagaattaattgaatttggtcttgtagataaaaagacatataaaggttacccacttaaagttgaatactcacttacacctattcgagggaaacaaatattggatgctttggctataatgcaagatataggaattagctttatgttggataatggtatggaagatattcttaaggaaaaaggtgttttaaaataaatagatacccacaaaaaagtaagtaatttaccattattttcaactggtatataattaaattatagatatattctattaatttattataataggaggtaaattattatgaaagtaactagtacaggtatagtaaatggtgttatagaagataaatacggtaaaagaggaactcagttcaatgaaggtggtatgcctacatattcactacctctaaagtttgaagatgctccaaagaatacagtatcctttgctgtatttttagaagataaagactctgttcctgtatgtgggtttgcatggatacattggttagctgtaaatataacaaaagatgagttaaatgaaaatgaaagtgtaacagctactgattttgtacaagggactactagttggcatggcaaactaggaggtcttgacagattagaggccagtgtatatggtggaatggctcctccagacagacctcatgtctatgaaatacatgtatttgcacttgatactatccttgaccttgaaaaaggattctatatgaatgaatttttcaaagctattgaagggcatgttttagatacatttacactaaaaggaagctattctaattaattaggtttactatagctaatcattaattaaatgctacatttaattgatgattagcttaattgttattagaatattttctgcactttatcttaatatatattttagttgactggtattttaatttctattagattattatcaatttatataaattgattttagcttaaaacttacttatctatttcagtttctattagaattattattagactcattaaaataaaagcattaatataactaataatatatgttaaattcattaactctacataaagttttataatctaaatgaaatacaataatctgcataaaattcaatagcttatataaaatttagtaatttatataaatattatcaatctatataaaatttaataacttatataaatttaactaatttatataaaatcttaaggagttgccatgataaaaaaaatagagcatgtggtcattactaataataatatagaaaattatatcaatttttataaaaaatttggtttttcatctaaagaaatgagcgaaaagtataaacttaaggctagaaatgttaagataaatcttaacataaaaggttataaatttttaccttatgttaaaaatttaaaagcaagtagagataacttatgttttaaaataaacacaaatattgatgagccaaaaaaatacttagaacaaaatgagattcaaattaagcgaggaattgtagaatgtacaggtgtctttggtaatatgaaatctatttatttgaaaaaaactaatggaaatttaattgaattatcaaatcatagaatcacggagagtaaaccttggaaaatttaatcctatcaataaatgttgttcttcctttgtttctcacaatgtcacttggatatgttctaaaaaaattaggtctatttgatactcatactttaaataaaatgaataatgtctgcttcaagtctttcttgccattattattattttttaatatatacaatacagatttagatggttctcttaattttaagcttatggctgtagctgttataattattttttcaatcttcttaatcttagtctttattattcctaaaattgaaaaagataataagacaaggggtgcattaatacaaggtgtatttcgtagcaatttcgttatatttggtattcctgtgacaatttcactatttggcgataagagtattggagtcacatctttattaattgcagttattgtacctatgtttaatgtattatctgttgtaattcttgaaatttttagaggtggcaaagtaaatataagacatatgattaaaagcgtcttaacaaatccactcataatcgcctcttttataggattgacaatgctaattttaaatattaatatacctacatttttacacaaaactattggtgatatttctaaaatagctactcctttatcacttataattctaggcggatcttttagtttttctgctataaaggggcatataaaaaccattatattgggcgtatgtggaaaacttatacttgtaccttctatatttttaccaattagcatttttcttggatttagaaatgtagaattaacttcacttatgataatgttatctgctccaactgcagtttcttcatttacaatggcacaacagatggattctgacagtgaattagctggacaaattgtagtatttacttctggattttctataattacagtatttttaataatatttattttaaagcagaataatcttatttaatgatatttgataacacaaattggtattatgagaaacatatataaaattgatttaattgcgtaaaaacatattattatactatttttactatataatataactttgtgtatattatctcattaaacatggtgaaagtagtgttgctatatattttttagtttgaaaaaaatatataaatataaacaatatataaatacaaataataaatgccaacaaatagtcaatctataaaataaaaactggactaatcatataaaatcattagtccagcttttattttacgtactttttatgttgatgtacttttattaaaaactaaatttaatttttaaatatctagcaaatgcactaattaaataatggccagttattcaacaatatcactacttcttaactataagtaatgccaatgcatttataaaaaataatactgctgttatctttgtaactctagcaagaaatgcttgttttccttttggtttaaagtaagcttgacttccttctccaccaaattctgaaggtaaagcattttttgaatcttgaggcattatgctaattactagtaaaatccctagcactacttgcacacccattaaaatgttgctcattattgcccctcctatctatttattacttaaatttcattactctttagtgtatcacaataatatagtcatttcaagactattgaagtataaataacaaacaaaaataatatgcaattactatatcttttttgaataacgtacttctaataatttttttccaatatgtatctctttctcaaaatcatcacaagtaaaaccattttttttatagaaatttatagctctagtattgtcttttagaacccatatcgttatatatgaatatcctaaattgcttaatctatcaatgcaaaattgtaatcctttttttgtcacagatgttccccaaaaatcgggatggaaatatatagaatatatttctccaacacattttggagcattatcctcttgacttctatttaatgaagcaaaaccagcaggtataccattcactttaaaaagataatattcctcttcagcttttggaataacactttgaaaaacttctgctcttttctcagaagtgaattcatctattatcttatctggaataattcctttatacgcttttctccacgaacaagaatgtataaaacccatttctatagcattttcacttgtagctcgtataatctctaaattcataaaaacaccatcctattgacaaattaatacgattatcgtactatattagtgcgataattgtatcatatatggaggtaaaagtcaatgaatcctgtaaaagagctaaacaacctgtggcatattgttagtatgcagatgaaaacagaaatgtgtagtggtaagtatcctactattcatggtatttctttagtagaattaagtattttagaaatagttgaacagtatcccaatagtatgatgaaagaaattagtgaaattttagaattgccaaaaagcacattaacaagtgctgtaaaacgtcttgaattaaaaaaatttattaaaaagaatccctgtattaaagacaaaaggaggtataacttagtcttaactgaattaggtttaaaggctcaacaagaacatagagacatagaaataattgtatttagaaatctcttacatcaattagataaagatgaaatagaaacttttattcgtattttttctaaagctgtgaataaaagtaagaaatgaaatataaaaaaaggataagtgaattgaaaaatcaactatcacttatcccttataagataaatttttatcttttatgttatctttttaatctttaatgccatatttttaatcttcaataactatttttttaaattatagaaagattttaatccacagtatctagcttgttctccaaccatttcttctattcttaataattggttgtacttagcaactctatcagttcttgatggagcaccagtttttatttgaccagcatttactgcaacagctaaatctgctatagtagaatcttcagtttctcctgatctgtgagatataacagcagtatatcctgctctcttagccatttctatagcatctaaagtttcagttattgtacctatttgattaactttaactaatatagagttagctactccattttcaattcctttttctaatctctctgtgttagtaacaaataagtcgtcaccaactaattgtaatttatttcctaatctttcagttaataacttccatccgtcccaatcttcttcgtctaaaccatcttctatagttattattgggaagttgtttgaccaatcttcatataaagcaaccatttcagcagcagttaactcttttccttctcctgctaaaacgtattttttagtttctttgttgtacatttctgtagcagcaacgtcaagtcctaacataacatcttcacctggcttatatccagcttttgttatagcttcaactattaattctaaagcttctctgtttgaacctaagtttggagcaaatccaccttcgtcaccaacaccacaagctaatcctttttctcctaaaactttctttaatgaatggaatacttctgctcccattcttaaaccttctttaaagcaacaagctcctactggtaatatcatgaactcttgaacatcaacgttattatcagcatgctctccaccgtttaatatgttcatcattggaacaggtaattgtttagcatttactccacctaaatattggaataatggtaaacctatttcatcagcagctgctctagctactgccattgaaacacctaatatagcattagctcctaatttacctttgtttggagttccatctaattctatcatgattgcatctatagctggttggtcaaatgcatccattccttctatttcaggtgctattatttcatttacgttagcaacagctgtttctacaccttttcctaagtatcttcccttatctccatctcttaattcaacagcttcaaaagctcctgtagatgctcctgatggaactattgctcttcccattgctccatcttctaatactacttcaacttctacagttggatttcctcttgagtctaatacttctctagcatatactaattcaataactgacatttgtatatctcccttcgattttctattagttaaattttcatttactgtaaacatccgtctactattttaatctactttctatattatagtacataaagttgcttttgaaaattaggtacaaatttatttgatgggtaaatttgtaaaagttcctatttttattttattttttataatattttaatttatataatataaaaaaacttgtctaaaatccaaaaccaatcttaaatacacaaatattataactagatttaaaacattaaacataaaatgtacaactaatgattctaaaatttttgcttatataatatatattaattattattatttatattgttattgtctatcttgttattatttatatcattatttacattattatctatattataattttttattttataaattgtctatcttgtaaattttataaaatataccttcatctacaccttacaatatccagaacttacaaaatctaaatcttatgtcataaagtctaaactttacaaaataaacctaaactgcattatttttaaatttatattgtagtttatatattattctctacttatcagaatcgactattttgaaataagtgaatgaccagtcatttcttctggcttttctaacttcatcatatctaaaacagtcggtgctatatcagataatcttcctccatccaataattttgcactttcatattcttgaccaactacaataaatggtactggattaatagagtgagccgttacagtttttcctgtttccgggtctaacatatattcagcatttccgtggtcagcagttattattgcacttccacctaactctactattttatctatcaattttcctacacaagtatctacagtttcaacagcctttatagccgcttctatacttcctgtgtgacctaccatatcaggatttgcaaagtttaatactataaagtcaaacttatcttctcctaatttatctaaagctttatctgtcaattcatatgctgacatttctggttttaaatcataagttgcaacctttggagaaggtatcaatagtctttcttcacctttatttggctcttctactccaccattgaagaagaaagttacatgtgcatacttttcagtttcagcagctctaagttgagtttttccatttttagctagatactcacctaaagtgttggctaaagattgaggtccaaatgctatatgcacattctctatagttatatcgtactctgttaagcatacaaagaagtttttaatatcttctcttttaaatccatcaaactcttcacaaactaaagctctagttatttgtctagctctatctggtctaaagttgaagaatataattgaatcattttcctttatacttccaactggtttatcatctttcataataactgttggcattataaactcatcattttttccatcatcataagagttttgaatagcttcctcaatagaatttgctttttcaccaatacctctaaccatggcattgtatgcaagttctactctttcccatctcttatctctatccatagcgtagtatctaccagaaactgtagcaaattcacctactccaatttcatccatactagcttgtacttctttggcatattctaatgcactttgagggtcagtatctctaccatcagtaaatgcgtgaacatacaccttttgtacgcctttatcttttgccattttgattatagccttaagatggtctatatgtgaatgtactcctccatcagacaaaagtcccattacatgaagagaattttcttttgcattatccattgcttcacataaaactttattagcaaaaaagtcaccatcttttatagattttgttattctagttaaatcttgatatactattctacctgcacctatgttagtgtgtccaacttctgaatttcccatttgaccatcaggtagaccaacatcaagaccactagcatttatcaatgtgtttggatactctttttttattctatctaaattaggagttttggactcagcaattgcatttcccttaacatccttattgtatccaaacccgtccataataattaaagcaactggttttttcatcatttcactccttagaaattaacaaggtctaggtaatcattactagctaaactagctccacctactaaagctccatctatatcactttgacccattatttcggctacatttgaaggtttaacacttccaccgtattgtattctaacttcattagctaattctccatataatccttttataacttctcttatataagatataacgtcattagcatcttcagcagttgcagttttaccagttccaatagcccagattggctcatatgcaacaactacttttgataaatcatctttaagaacattttctaaagctttttcaacttgaactttacaaacatctttagtttttccagcttctctttgttctaaagtttctccaacacataatattgggtctattcctacttctaatgcttttaaaactttcttgtttacagtttcatcagtttcattgaagtattgtcttctttctgaatgtcctattacaacatagtccatatctatttcttttaacataagaggtgaaacttctcctgtaaatgctcctttttcttcaaagtgcatattttgagcacctatctttatatttgtacccttagtagcttcttttaaatcctttaataaagtaaatggtgcacatataacagcttctactttatcagaatttactttatctttaacttcatttacaaattctaaagcttcttttattgttttatgcattttccagtttcctgcaattataggttttctcattttacaatctcctctatatattagtttatttattatctaatgctgcaatacctggtaattctttaccttctaaaaattctagtgatgctcctccacctgttgatacgtgagtcatcttgtcaccaaatcctaattgattaactgctgctgcactatctccaccgccaattacagtagttgcatcagtcaactctgccatagctctagctactgataatgtaccatttgcaaagttttcaaattcaaatactcccattggcccattccatactacagtttttgattcttttatagtttttacaaagtttgctatagtcttaggtcccatatctagtcccatgtaatcttcttttacattagcatcttctgttactattggagtagcatctggtgcaaagtggtctgccataacaacgtctactggtaataataagttaacacccttattattagctttttccatcatttctttagcatattcaactttatctatttcaagtaaagaagttcctacttcataaccctgagcttttaagaatgtataagccattcctccacctattattagattatcaactttttctaataattcgtttataacagctaatttatcagaaactttagctcctccaagtatagctgtaaatggtcttacagggtttgcaacagcttctcctaagaattttaattctttttgaattaagtatccacaaactctctcttgtaaaaactcgcctgcaccaactgttgagcaatgtgctctatgagcagttccaaatgcatcatttacaaatatttcagcaagtgatgctagttctttagagaaattctcttcgtttttagtttcttcttttctatatctagtattttctaataatactacatctccgttttccattttttcagttgctttctttgcattttctcctacaacattatcgtctgctgcaaatacaacttcttttcctaacatctcagataatctctttgctactggtgctaaagataattctggtttagcttctccttttggctttcctaagtgagagcataatataacttttgcccctttagaaattaaatattgaatagttggtaaagctccgttcaatctattttcatcagtaattacaccatcttgtaatggcacattaaagtcacatcttactaatactttttttccgcacacatcaatatcttctatagtttttttgttaagcattgacataaatatctctccttttaataaagtaattttttattgccaagtataatatagtacatacttttaccctattaaatatatcatattatcatatttttatatatagtatgtaacattatttaggtgtattttatatattttttcttaaaaaaagtcctgagtccgtagtattaaactacaaactcggactttgtcaatctacttttctattttctcaaaactgactattttgctaattgtgcaaagtatcctaaagttcttattaattgagaagtataagacatttcattatcataccaagaaacaactttaactaattgttttccatctacttccataacttttgtttgagtagcgtcaaataatgaaccgtagcttattccgattatgtcagaagatactaacatttcttcagtatatccgaaagattcgtttgaagcttctttcatagctgcatttatttcttcaactgtaacattttttcctaatgtacaaactaattcagttattgaaccagttacaactggtactctttgtgctgccccatctaattttccttttaatgaaggtattactaagcctattgcttttgcagctcctgtagtgtttggaactatgtttccagcagcagctctagctcttcttaaatcaccttttggatgaggaccatctaaagtattttggtcattagtgtatgcatgtatagtagtcattaatcctttttctataccgtatttatcatttaatactttagccattggagctaaacagttagtagtacaagaagctcctgatataactgtttcagaaccatctaatatgtcactgtttgtgttgaatactattgtttttaaatctccagtagctggtgcagatataacaactttcttagcccctgcttgtatatgagcttcagctttatctttagatgtaaagaatcctgtacattctaatactatatctactcctaattcagcccatggtaggtcagcaggatttctttctgctgttacttttatttcttttccgtttactacaaaagcaccttctttaacttctatttctccgttaaatcttccttgagctgtatcatatttaaataaatgagctaacattttagcgtctgttaagtcgtttattgcaacaacttcgaacttatcttgttgctccatcatttttcttaatgctaatcttcctattcttccaaatccatttatagctactttaaccattttcgctacctcctataaagtaaatgtatgttttctagctctgtgctaggtcttgacttttataataatgacaatatcttataagcactttcttcatctgttacaagaaccatgtttttatgcatatttgatatagctaataaggcttctactttttcagtccctgcaaagattgcaatagtttcttttacttgtttaactgtttctaaatcaattccaacagtgttcagtttgtaaactatttctccatctttgttgaaataatatccaaatgcttctccaactgcatttttagataatatctcatcaaccttgtcttctggaagttttcttctctttgccatgacatctgctctacctatactaaaaactaaaatgtctgttcttttaatatactccaaagttgtcttaatctctggcacttggctaagagttttcattgcactttcatccaactcatctggtatatgtaaaagtttgcaattagaatgtaatttcttacttattgaagcaactatattgttagattgcatctctacatcagttcccatacttcctctagctggaactattgtagagtttggatatctcttatcagttttaataacgtttgaaaactccaacatagtgcttcctcctgttattgaaacgatatctccatcttttaaaatgcctaagaaatactcgcatccatatctagttacatcttttagtaaacttccattttcatcacagcttccaggaactagtattaccctttttattccaagcttttctctgactctatcttgtaacttagacaatcccatgatgtcactcatgatgtccttaagtttatctaacaaatcagaaccttctttagtgatagtcatcccagatacagctacgtctataagtccttgttcttttaaaaactcagtttctgacctgattattctttcactaatctctaatacatttgataatgttctcctacctattggttcacttaaagatatttgtcttaaaatagagtatcttctttccataagttcaattgcctgtggaatcaatttcttttgaatttctaataagttcttcataacatactccttattgctttcctttcgggactttttttgtccctagtgtttatttaagtcccacaagatatttttattttataggatttgcgtatagatttcaatagtttttcaaaaacttttttatttttttattttataaaatatttctccaccattttcaaatcacagtattttttctttttatataaggctttttatatatatttttttatattttcattctaatatttattactataaataattttatttctagttacttttatttctagttatttttatctacaactaagtttacttttatctagttaagatttttatttataccctacgtgttttccttttgtgattattaaatttaataatagtttatttatctaggtattcttctttttctaatatctaattattctttacaaacacttatttaatttaatcattctttataagcacttatttaattatgttttctagttttttagcattttacaatattttaatgttccccagtttttcaattctttttagtatttttatattttataaattttaatattctttaaagttctaatattcctcaaagcctaatgttctttaatgttttaatcttctttagttttttatgttctttgctatcttaatgttttaatgttccccagttttttaataccttatagcattttaatacttttccatattctattattttactttataaaatttttagcccaatctacattcatctcttaattagccttttccccttaccatactgatatttgtcttttacttattagtattcttttctcttacttgaagatgggattcctaattcttcacgatatttggcaactgtccttcttgcaacattgattcctttttcttttaataacttagatatatggtcatcacttaaaggtttctttttattttcgtcttttattgtttcctttataattttttttatgcttgtactagatgccatttcattattctcagtctcaatggcgctactgaaaaagtacctaaattcatatacgccaaaaggtgttagcatatatttaccatttacacctctacttatagtagattcatgaaattctaatttttctgctatgtctttcattttcaaaggttttatatattttgtcccttttctcaaaaattcatcttgagcttttactatctcttctgcaatcttaagtactgtagttttcctactctctatatttttcataagtcctgttgctgaatttagtctttcttttataaattcttttgcactttcatcagactgtgaattttttaatatgtctttataataactattgattcttatttggtaagaatctttctcatttaaatatacaataaattcatcatcaatcttttctactgttacatcaggttgaatgtatacacttttctctactgaacaagttcttcctggtttggggtctaatgtcttaattatgtttattagttcaacacatttttgtaatgacatattgtactttttacttatctctttatatttattatttgcaattaaatttaagtcttttgtaacgatttcctctaaaatttcattatatattcctaaactagccatttgtatcatcagacattctgaaagacttcttgcccctactccactaggttccaactgctgaacactaattaaacatttttcaaaaagttcttcatctatctttaaggtatcaacaattactttttcctcagttcttaaatatccatcctcatctaaactatcaattatatactcacagacttccaattctttgtctgtaagtttatacaggcttatctgaaattttaaatcttcatataaatttgacgaatatttaactaaattttctagattaacttcattatcaggattatagcttatctctgttctatctaaacgtcttgacctatccatgtcttttatatactcttcccaatttatctccccacttttctcgacttcaactaatgggttattctctgcttctctttttatctcttcttctaactctaacttactcatatttaatattgataatgattgcttaagttgtgtagtcattattagcttctgagactgagttaattctagactattattaaaattcattctgctcacctctcaattttattaaacttattttataaaagaaaaaccctcctgtatatgtatattctatcatttaaaatataccttatgcaaaagggttttttttatttacaatttcatctatttttttatttaatatttcttttttttgttacttttttttactatatggagtattttgtagtggtagctcagttctaaattctttatcaaatacataataggcattttgtactgctggtgcagtaggaactgtacaaatttctcctacaccttttgccccataagccaataaatctttgttcttttcaactattaaagcttgtatttctggtatatctgtagatttaaataaacctaatgtaccaaacttagctgtaggaacagagttaactactgggtaatcttcggttagagcatatccaagacccataactactccaccttctatttgaccttctaaactgattggatttatagctcttccaacatcatgtgctgctactactttttctagttttccattttcatccagaattacaacttgtgttgcatatccataagcaacatgacttactggattttctttgtcacaacccattttatctgtaatactttcatattctccataaaactcttctccctctaaatcaagtaaagttttgccagagtctaaagcttcttttaacttatttgatgcaaccttagtagcttctcccgtaaatactgtctgtcttgaagccgtagtattaccagagtctggtgttaaatgagtatctggaacttcatgcactatattttcaggaagtaggctagcagtttcacaaactacttgagtcataacagtaccaagcccttgacctatacaagaagcacttgttcttatgtgaactttgccatcttttatcaccaatctacatcttccaacatcaggtataccaactccaaccccactatttttcatagcacaagctatacctgcacgtggatgcttttcatactcttcttttacagcttctagtgtctctgccattgctgttccttcatctgcaaattgaccatttggtaaaacttgcccaggtcttattgcatttttatatcttatctcccaaggagatattccaaccatttcagcaagtaaatttagattacattcagttgcaaaacaactctgtgtaactccaaatcctctaaatgctcctccaggagggttattagtatatactgctgttcctgttatatcaatatcttgataattgtatggtcctgctgcatgagtacacagtctttgtagcactggtcctccaagagaggcatatgcacctgtgtcagatattatcgttgccttcatacccgttaagtatccattttcatcacatgctgtcgtaaattccatttctgtggcatgtcgttttggatgaacaataatactttcttttcttgttaactgtacttttacaaatctctttgtatggtatgcaagtaaggctgcatggtgttgaacactcatgtcttcttttccaccaaaccctcctcctaccattttgtttataactcttaccttctcatatggtaaccctaacatatctgcacattcatgttgagtggcaaacaccccttggtctgttgaatagattattactccatcatcttcataaggaccagctactgcacattcaggctctaaaaatgcgtgttctgtagcaggtgtagtatatcttttagttacaacatattttgaattttctatcttttctttagcgtttcctcttactaaatgttccttaacaagtatattccctgtctcatgtatctttggagcatcttctctaagtgcatctgctgtagtacttaatggtgttaattcctcataatctatcttaactagctttttggcctcttctaacgcttctctagtttctgctgctactaaaactattccatctcctaaatatctagttatttcaccttctggtattaaagtatcccaatccttctttaagtgccctacctttatagttcctggaatatctttagctgttagaactgcaacaactcctggataagcttttgcttcttctatatctatttttttaactaaagctctaggatacttagctctaactgctgaaccataaatcataccctcaattctcatatcatctacatattcagaatatccaagtgctttgccaactgcatcaactctaggaagattttcacctactagacccttacagtttacttttggcacatctatattttctctaaaaatctttgctgctaaatcgacagctttaattatttttacataccctgtacatctacatatattaccttttaaagctttctttatatcatcttcagtaggattattattaacatctataagtgcttttgaactaattaccatacctggaatacaaaatccacattgtacagctccttgactagcaaaagaatatgcaaaaacatctctttctctctctgataatccctctatagttgttatgtttttcccagctaatttatcagttttaaatacacatgctttagtagctttaccatctattataaccatacatgttccacaagcaccttctgaacagccatttttaactgaagttatattcatatcttctctaaggaagtctaaaagttttttgccttcttttgcaacaactttctctccatttaatataaattctaccattctctagccccctttgttagacgcctatttatatatctcccacttggagtattacaaattaattctccatctctaactacttcttttcctcttaaataaacatgttctatttgacaatccacttcatacccttcataaggtgtataatctacattttgtaattgtttttttgcttctattttggattttttgtttggatttaagactaatatatctgcatcactgcctatttctatagttcctttattaggatacattccaaacaactttgctgcattagttgatgttacttctaccatcttgttgatagatattttatttttacagactccatatgtgtataaaagactcatcctatgttctacacctggagaaccatttggtatcttactgaaatcgtttatcccaagttccttctgtcccttataattaaaagaacaatggtctgttcctatagtgtctatttgattatctaaaatagcattccataatatttcattattttctttatttcttaaaggtggtgacattacatacttagcactttcaaatccatctaaatcatataattcatcatttaatagaaggtattgaggacaagtttcaactattacatccacacctctttgcttagcttttaaaacctcctctaaggattctttacagcttaagtgaactacatatacttttgagtttgcaacttcagctatcttcataagtcttgatgtagcttctgcctccattatagctggtctagttaattgatgatattttggagataaattattttctgactttgctttatccacaagttcacatattatgtccccattttcacaatggaaaccaataatccctcctatctcttctgcttttctcaatgcttcaaagattacaccatcatcaacttgaaggcttcctttatacgccatatacagtttaaatgaagatactccctctttcaccatatcctccatttcattacaaaccgagtcattccaatctgttatagccatatgaaagccataatctgaataggatttatccttagctttttcatgccattcttctaatccgtctttcaaagaacatcctttagcttgtgtagcaaaatccaatatagtagtagttcctcctactatagcagcttttgttcctgtctcaaagttatctgctgtcttagtaacgcctgtatctaagtcaaagtgtgtgtgtgtatctatacctcctggtataacataagaatcactaacatcaactatttcatcattttcttttgatatatcaagacctatatcgactattttttcatcttctattcttacatctgcacagtaagttttttcacttgttactactttcccaccttttaaaacaattcccatatagactccaccttacttgtaatgtatcaatttattttatatgaaaaaattaacttaaagtaatctagttagttcacttatacgtagtaaatctatattaagattaaaccaatacctaattaaattaatattcagctaaactaatatttagttaaatcaatataataaaattattaactttagactgtattattaatgcataatgtgtgtttgtttatctgatatattttattatcctaatacctattactctaagttaattaccaaaattctatataattattactcattcatagcttctacttgattgtagcagatgcttaaagctccttttggacatctagttacacataatccacatccaaaacacttgtctgcatctatgttcaacttatctgtaacttctaaagcttcgtatacacagcttgttacacattgcttacatttgatgcacttgttatcatccactactggagctactgaatgagttctaaaccctctagctgccattttcttatgagttaatccttttatttcattaacatcagcatatccattctcatctaaaaattcatttaattctttagcaatttttccatagatagaaggccctttaaggattgcttctgtacatacttgaacagcacttgctccagccatcatcatttcagccacgtcttttccacaagtgattccaccaacaccgattattggtatatttacaacttgagaagcttcatatatacatcttattgctagaggtcttattggtgcacctgataaccatccgtatccagctttacttcccattatagggtatcctgtatttacatctattgccatacatggtccaaatgagtttatcattacaagtccatctgcacctgcttcttcaacagcttttgcaatagtttgaatgtcagtatgaggactcattttcataaatactggtacatctaaaacagcttttgcagcttttaaagcatttactattggtgcaacgtctgtacctacataatgagtagataattcaactgcatctgcataaggctttactaaaggagcaacctcagctatttgctctgctgaatatcccatacttactattactggaagccctgtttcttttacctttttgtattcttcctctatccattgctcttttggaagctctgaccataattctgtgtttaaaaaaccactattagtttttgccatacatggtcttggtacatcagctggtaatacagatatagtttttgtacatatagctcctgctccaccttttgctgcctcttgacagagagcaccatcttttgctccaggtcctgccgctgtcataattgggtttaaaaattccattccatataaattaacttttaaattagccatattattatctctcccttaaattaaatatttttaatatttagattgtattcttttatttgtattcgttatttatttacttttttatattatttaaaatataagatagttttgttgaattattaatatctctgaattatttttattaatgcttaatgactttaagtcaatatagatttttacttgttttatttttattttgcttcttcaactttattatttttttcttttttagaacctagttcattgaagaatatgtttaaaagcactgctgataaactacctgttgttattccactatggaatattgtttgtacccaagttgggaaattatgatagaaatcgggatttgttagtggtatcatagacaaaccaacactaactgctactataaccccatttttagttccatcaaatttcactttgcttaaagtttttactcctccaaccattaccattccaaacattgcaaatcctacgcctccgagaacaggcttaggtattgctcctattattgctgcaaattttggtaagaatccaagtactagcaatataacccctgcgtaaactgctataaatcttgattttatacctgtaagacctactattcctgtattttgaccaaatggagttattggaaatgaattgaatattccagataatgctgtagatattccatctccaaatagacctcttttaatatttttacctgttacttctttgtctaccatttcatgaatagctatcatattaccaactgattccgtcataagtaccaacataatcaaacacaatgatagtattgcagatggttcaaatctaggcattccaaattttaaaggtacatttaagttaagccaaccaactccatttactgcactaaaatctgccattccaactgccatggaaagtagtgtaccaagtactatacctaccaatatagctgtgctattccaaattccttttaagaatttaaatgaaagtaaagttattgccaatactgctaaagctaatgctaatgagtttggttcaaccgcttccaatttgttgtcagttatccattttatcccaactggaaatagtgaaatacctattaccataacaactgttccagtaactacactagggaaaaatcttattaatttttcaaatactggagcaagtaatatacaaaacaatccagctactattacagagccaaatactgtctgtattgcaacttgtgaatcactatatgatgaggctattgctgtcatacctgccacagcggcaaaactagttccttctattactggtattttagcacctacaatatttcctataccaacactttgtatgagtgttcctatacctgccataaacaagcaagcatttattaaaaaaacaatactagcatgatctagtcgtgcagcacttcctatcatcataggaactgctactgctcctgcacacattgctaaaacgtgctgtagtgaaaatacccaagatttggatacaggtaacctttcatctactggagctattttagggcttttatcttgagacattttgggtctcccttctatatttaatttaatattctattccgtatattttttatttatatacttcatttaaattcctatttttgtttaagctctgtttttaacatctaaattcttgtttcttacttgtatattaatctgaacctcccatgactaaagtcacagggttcctgcttcatagaattttgcataatcaattatttaaattctattccatagattttgacttaattctctactttttgctagaatactttcttcatctatgtttattaactttctatctttcataagtacttttccatttataatagttgtatctacgcttcttccactcattccaaaaatagtgtgtccccctattgtattttctgtcaatggagtatgtggtatataatcaactactataacatctgcataagcaccttttttaagtactcctaggtcatttttataataagctttagctatttttctattgttatcaaataacattgtttgtgattcttcaaatccaactcttgggtcttttaagtgatgtttgtgaattatattggcaacttttaatgattcaaacatatcgctagtatatccatcagttcctaatcctactgtaactcccctttttaataactctattgcaggagaacatccaactgcatttcccatattagattctggattatgaactacaaatgtatttgttttatttaaaagactgatttcttctgcacttatatatatacaatgaactgctattgttttttcttttagtactccaaaatcattgaatctttctaaaaccctttttccatatttatctacattatattgtaagtctgctagtccttcagcaacatgtacatggtaacctgtatcaagaccagccatctctgaagcacatttatttaatgtatcatcagatagtgtaaatgcagcatgaagcccaaacattccttttatcatgtctgtatcatctttttgagcgtattttataaagtttacgttttcattgataccttgttggattgtatttccaccatctctatcagacacttcataacaaagacacgttctaattcccaaatcctttgcaacatctgatattgtaaacaaactgccttcaattgcatttggacttgcatgatggtcataaactgttgttacaccattttttatgcattctatatacgttgcatatgcactgtattttgtatcttccagtgtaagctgtttgtcaagtctccaccataaattatttagtatctctaaaaagttctcagaaggttttcctggaactgccattcctctagcaaatgagctgtatatatgcatatgtgaatttattagacccggcatgattattttcttgcctgcatctataaattcatgtactggatatttagctttcatttcttctgtagtacctatatcttcaattagattatcatttattactacacatccatcttccatatagggatttaaagaatcttggcttattagcctcccattccccactaaaatcataaatttattcctccttaaagctaagatttaatttttaagtacttttcctgctttaattttattgtattttccttcttcaacaacacaatttccatttataattacgtaatctatacctgtagggtactgcatagagttgataaaatcatcacaaccactaactgtatccttgtcaaatataactatatctgcaaaatatccttcttttaattcgcctctatcttttatactaaagcttgtagctgcctttttagtcattttataaacagcttcttcaattgttagtacattcaactctctaacatatcttcctagtattttagggaaagaaccataagctcttggatgtggtttacctgctaaaagaccatctgtacacacattttgctcgtctcttttcatgaatcctattatatgttcttctaatccatagaaatctaccatcccaactgcattttcttcttcttttaataaatcaaacgttgcatctaatgggtcttttcctctcatttttccaatttctaataagctcttaccaattgtatctttattcttttctgtttttacgcttgttacaaatatttggtctattccagcaaattctataaaattatcccagccttctattccatttgctatatcttttttcatttttgctctttcgttttcatcgcttaatctttctattaacttatcagttcctccagaatgtgcccaaggaggtaaaactactccaagcattgtacttcctgctgcatatggatattggtcaaaagatactcttattccttccttttctgctttttctaaaagctctataacttgtggtatatacttccagtttgctttaccacaaaccttaaaatgtgaaaaatgaacttttactcctgattgttttccaatttctatgatttcttccattgaagttaaaattgtatctgcttcacttctttggtgaactacaaatactccgtcatattttgctactaccttacacatctctataatttcttcagtcaatgagtatgcacaaggtatatatataagtccagtagacaatcctatagctcctgcttttaattctctctctgtgatttcacacattttttgaatttcttctttagtagcaggtctatcttcaagtcccatagcttccattctaacgtttccatgaggtactaaataagtttcatttaaacctaccccattgtaatccatcatttttaaataattctctgttgtttcatatttccaatcaatttcatcactttcaccatctagacctgctaaattttttctccaagaagatatatgctcttgaggtagaggggccatagatataccatcttggcccaacacttctgttgtaattccctgtctaatctttacctcattatatggattaactaaaataactaggtctgaatggctatgagtatctatgaaacctggacatataactctaccttttgcatctataactttgtcagcttcttcgtttaaatcttgtgatatttttaatattttctcgttttctattaaaatatctccttcatatgctggtgttttatttccatctactataagcccatgttttattaaagttctcacaaaaccatctcctaattattttttataaactgattttaatataccataatatccttctgcacctttgaataattggtctaattctatatactcatctattgtatgagcaagattttccttagaaggaccaaatcctatagttcttattccagcctcacctgcgtagtgacttccattcgtacagaatgagtattgagttatttctgaatctattccagcttcttttaatccattatacgctgcttgaacaaattcatcttcttcatcatataaccaacctgggaagaatctttcactttctatagtatttcctgtatagcaatcagctttttcaactgcataagaaacttttgcatttaattctgggtcttctttcatcatttcatctaataaagcttgtattggagctaatacgccttctcttgtttctccaactaataatcttctatcaaaagtagctttgcaataatctggcactactgatgctcctggatatggagaagattttatatctgttaaaactaatattccatcacctaaaactggatgagttggaggtactaattgttgtatcttttggattacattagccattttataaactgcatttatacctttttctggattagcagagtgagctggtttaccaaaagtttctactactatttctcctctacctctttgacctatctttaagtttaattctgaagattcacctattacaacataatcaggttgaacagccttacttatctctctagctgaaacaccttcaaatatttcttcatgaacaacacctgctacatacaattcaccttcaaagtctttgttagtatcttctgcaaagtatgaaacagcagccatcatagcacttacttgccccttcatatcagaagttcctctaccatatattttcccatctactattctcgcttcaaaaggaggaacactccatttacttgcatctggaactggaactgtatctatatgcccgtcaaataatatttttttacctggtttatttccttttatacatcctactatatttccatatctatctcttgaccaactatcaaaacctagtaaagcaaaattttcttctatagcttttactacgttttcttcttgacctgaataactagcatttcttattaagtcttggcatacttcagttaattgtttttttcttgtttcatttaacattttgatattcccccatataatttttaatttgttgacgttttattttgatatttcacttttttaatttattagcatttcacttaatctattgattttttatttctttatattttatttattaaatttttatttagactttattttaattttatttggttttatttaattttatttagtttttattttgaatttttcatttgctttactttttcatttatttagatttttcatttgttttagtttttattttatttaaagttttcacttatttaagtttttattttccttaaatttttcatttatttgttaagtttttattttccttaagtcttttatttactttggcattcaccattccaaactatatctctatatttatcagggtcagtatctccttctgtacttattaataatactttagagttctcatctagtttcaaagcttctcttaagtcttttaaatcttcactttcaaggattgaaactaatgctccagttgtaactgctccagattctccagagattactttctcatctcctcttagagggtttcctaatattctcatacctttagcagatacccagtctggtgctgaaacgaatgctgatgaataattttttaacacttcaaaacctatagtgtttggttctccacaagcaagccctgccattatagttggcatatctcctccaacaaatcttggttttccatctccagcttctgctgatttatagtaacaatcagcctcatcagcctctactactactgttattgggcattcatcatatattgaagcaacatacccttgaactgcaccagcaagtgaaccaactcctgcttgaacaaatacgtgtgttggtctatctactccatattcttttaattgttctatagcttctttagccatagttccatatccttgcattatccatgctggtatttcttcatatccgtcccatgctgtatcttgaaccattactccatggtcatcagcttctgcataatcattagctaatcttactgcatcatcatagtttaagtctgttatactagcatctgcaccttctcctttgattttatttaatctaaattcagaagaaccttttggcattaatacaacagatttttgacctaatttattagctgtccaagcaactcctctaccatgatttccatctgtggctgtaaagaaagttatttctcctaatttttcttttatttcttttgaagttaatttgtcataccctaactcagatatatctgtatctaatctttgagctaagtatctacccatagagtaagaaccacctaaaactttaaatgcgtttaaaccaaatctataagattcgtctttaacatatattccgcttacgcctagtgattttgctaagttatctaatttaactaaaggagttttttcatattgtggaaagctctcatgaaaagctttagcctttgcaatttcttcatctcttaaaaactcaattcctttttctttttcctctgatttaggtaagttatttaatttccattttatttctctcatttattttatattcccctttcaaatttttcggtgtcattttaattttttatctttgtgtcttatagtgaagcaattactatgccaatattatttattctaaaaacaatttttttatgttggaattacatatatttataaaatttctttgaattttataaatattaaatgtgaaaaataagatttataaaagaaaaaattctcatattgggaaatttttatcaatacgagaattatcaattcgagaaatcgtttatttattttaattcttcctttattatgctcttattttttatatgtctattgttttgtcagatatattactacttttattttctataaatatatggctataaccttcttacgcataaactctataaatttatatactttatattctttattacccaaatattctttattacccaaagcctccaaaatggcttaaatcttttcatagcttcttacagaagtttacatgggcgtccctccaataagcaaaagtgcaatatgtgtaccattgtgtcctacttgcgactattgagctgtcgaaattcgcaacttcgcatttatctgatgaaatgcactatgcaaaatattcataacatccacaacagagttaaagttacctattcatattcactgtaaaaatttcttccacaggaaatgtaattttaaccaatcctattgagacaaactcaccacttatttttttgaactcacgcagtaatacatcacttgcccgaaaaaaagcctcactttcatcatctccagtaagtgctattgtgcaatggggtacccaacgattggggtggtaccattcccaaccatttgaatcaaaatcttgtagtacctcatataattctctctgaaactgatacatactgctattcattataggtgatacaaacaccgttttagtatcattaaacatgcctactgaaccaatgtaagcaggtattaccttatggttttgtgcaaacccctttagcttgtctatgcaacaagcctcatccacatcattgaaacaagccaaagtaagatgaggtcttgttttccattctaagtacttcgtactaattttttcatcagcgatttttttagataaatcaaaaagttgcttttccgtttttttatcataatatagctctatcgcatattgcataataacacctccaccataaagtaaaaatacctatctataaaaacacacaaatacctatcattttaatattatattactactgttcctcttccaattttctatatagtgtagccaaacctatacctaaatcctttgctatcttcttcttcgtctttgtatctcttccatacttattcaacaacttgtttatgtaagtcaactctaattctttaattgaaagtatcctttcctgattctctactatccctccaactatgtcatcttcaaatattatatttatatccttatttttacaaacatttccattaatattataataatttaaaatatccaatggaagcatatctttatatattattccatcatctccaaccaaattcatcatatattcaactgcattttccagttcccttatatttcccggccaattatagttaatcaacatattcattacattttcttctattttatttaactgaatacctaattctaaagaatatttagaagcaaacttcatcattattgcctcaatatcatcctttctttccctaagaggtggcaaatttataggaattacatttaatctatagtataaatcatccctaaacttaccttcatttactaatttcaataagtttttatttgtagcagcaatcactcttatatctaaatctataagtttatttgacccaattctcgcaaattttctctcttgtaaaactctaagtaactttgcttgtaaaggcattgacaaatctcctatttcatcaagaaatataacaccttcatttgcaagttcaaatttacctactttacctccactactagctccactaaatgcaccttttatatagccaaatagctcactttcaaggagattttctggaatagcagcacagtttatcgcaataaatggcttgttccatctgctaccttcagcatgtatagccctagcaattagctctttacccgtaccactttccccagttataagtacagttgaatttgactttgctaatttcttagttctctcttttacttttaacattgcctctgaatttccaattatagactctatatcactatttccccagccactattgacttttccatgtcctttatgattgatatatgtcttgtcaaatattattattttgtcgtattgatttatatatggatataccggaattattttggcatttatattataaattttgttatcaatatcaatttctagtaattcatgtccatttgaggaagattcaacagatactatatttactatattttctattatatttttatatatatctaatttttttagagctatattgtttatataagatattttgctatttatgtctagtattataacgcctttttcaacattttcaatgatttctatcatcatatccatttttctactgctattttttgacgcttcatgttcttctattttcatagaaattaaatcgcatatatgattgacaaattttaaataattatctatttttgcacttatttctacttttttagttttatctgtactaatagcaccaattactcctatagttcgattattatactttattggaactgctattattactttatttaggcatttcatgtaatgggaacattctatacaaagctgattatcacatatatccaatacgactaattcctgacctgtctgtataacattgtcgtaaataaatccttctgtaacaacgctttcatttatctttgatttatacagacctgtaccactaattcttattaatctatcatcaactatttcaatatctacatctaacacactagctactgtttcagtgtattttatcatttcttgttgaaattcttttaatttacttaacatagtttcccccattagaatttaatttaccaaattatcagtttagctatattttaacatatagtcactctttaaaatatatataaaacattacttatttatatatttacattaaaacacacaatattaatttataaaaagtttgttttatatgatgaccttaattacttaattataagatacagacaataaagtaaatcacaatacaataataaaataaaaaaagctttcctcatataacaaatatatttttgacataaaaatatacattatatgagaaaagctcaatagttaaatatttagatagatttttatatagacttttttaatataaacttttttaattgtagactttttttattagtttttaatttttattagttttgttattggttttattgttataatacttataatactgccattgcttcaatttctaaaactgcatcttttggtaattgagcaacttgtacgcatgaccttgctggtggattttctttaaaatatgtagcatatacttcattaatatcattaaaatcctttaaatcttttacgaatactgtagtcttaaatattttatccatacttgtaccagcttgttctaatattgcttttacattatctaaagaagcttttgttgcttcttttgggtcagatactaactcgccagtcttcatatctattggaagttgacctgatgtagaaactatgtttccaacttgaattgcttgagaatatggtccaattgctcctggagctttctctgtagctattactacttttgacatgacttcacctcctattattaagttatatttacaggaaaataaaatttcctaaacaccaatattaatacgaacctttagattaaatttcaaatctaaaacttcaaataatcaatacttagatgattatgtttatttgtgtcttgttaacttttattaaagcaattaacgtgccaaactttatttatatataaaattttgtgaagtcattcaaaatagttacttctgaattttttcgtaaaaaaatgctttaaaattacttttttatgatgtcaatttttttctcatatctagaaatttaccaacatgagaattcttgttttgagaatttacagattaaagttatttttcaatcttaaattatcaagttattacatatgaaagaactatagttgacaatcccactattataaataataaaacctttacccataccttatttaccctagttatcatagagcctattgaaaatataacagctaaatataataataaccaaaaaattatcaatatctaccactgttgctgaaaatccaaaaaactaccttttgatagtattacttaacaatctaattaatctcataataaatttacaacttataaataaattgttatattggccgtatctcaacaactttctcctttcctagttttaaatcttttatagaattgtaccacgtctaagtaaattttcatactattaagtcttatttctaataaatcattagctctcattctatgcccaataatgtaagattgtagtaattttattgattttaatagttttatttaatatacttatattaattattttcatgtgaaattattacttatatagggggatttttttaatatgagcaaaagtgaattaacggcagaaacaacagaagaaatgttagaagtactaagtggtaaagattatgatattgcatgtcatttacatgaacttggtaaatcattagattgtaaaattgaaccaaaaacaggtgctcgttcttacaaaatagtatattcaactaagaaaccaaaacgtagcttatttactattgaatgtaatgaaaaaaaatggagagttaaagcaaatctttttcatctaaatacatataaagatgctgtggaggaatgctctaaaactattaaagatagtataactaaaactcgtacttgtaagaaatgtaattcaaagtgtattggaggttcttcgtttgatttagatggaaagtcttatctgacttgcataggaagtggtcattattttgcaaatatggaagaaatggattggaaaaacctagaaaaattaattactaaagaaaataatattatgcaggaatctgtatagttttttaagggtaattattaaaatatatgagtaacaacagatacttaaataggcataaaaaaataaagggtataataaggatatagaataaaaataaatgatatagcacaaagaggctgtctcaaaatatagataagcctctttttattgttgaaatgataagaatatattcgattttatacaattttatacaaacatactaagccaacttacccatttcatatgcctgtttcattgccttacttcccttaatatcacctacattccaagcacctacaccatatactatacctttttctttagaaccatttagacatgatgtaaatcctctaaatccttctattgttctttccatatcagccacattttcatctgctgctgcaacgataaaatagaaatctttatcacaaatttcagtatatctagagcaagttctatcaatcatagttttcatttgcgcattcatagtataaaaataaacgggagtcgctaaaacaatcacatctgccccaatcattttttcaagaatttctcccatgtcatctgtctgtgaacaacttgcttctttttcataacaagcaccacatccagtacaatagttaatatctttatcttttaaaaatatcttctccacttgatttttagattctaataccccttgtataaactggtcacacaataagtcagaatttccaccttttctaggactagctgatactattaatacatttttactcataagatactgcctccattttcttatttctactgctctttaatactttttctttctcaataataccttcttcatatctatcaatcttaaaatttaatcgttccaaagttttttgcatttcttctattctttttgctagttggtttctctgctctattaaaagttcttttctagctttgatagtactgctcccttgttgaaacatagctacatactcaattaatgtctcaatagaaagacctgcacctctcatacactttatgaaattaacccactcacaatcttcttctgtaaaagacctaattccacttttatttctatttacaggtggtattaaaccaattcgttcataatatcgtaaagtatccgctgaaagctcgtattttttactaacttctgaaatcgtcatacatatcttctcctcttgatattgtatagattgaattatttctcaaaggtttctgctacattctttaaagcatctataattttaatgtgttgaggacagctttcttcacattgtttacattcaatacaatctgaggcctttccataagttttagtataattattatagtaaaccatctgtgttgaaaatccagtattaagagcttgtttttctgcattgtacagcgcaaaatagtttggaatagcgatattttttggacagccttctacacaatactgacaggcagtacaaggaactaaaattgattcgttgataatctctactgcttcatctataatattatattcctcttgtacgaatggtttgaaattttgcatatatcctgtattgtctaataattgttccatatttgacatcccacttaagaccatcataacattatctttacttgctgcaaaacgtattgcccaagatgaaattgacatatctggattgtagtcattcaataatttctctgctttttctggtatctttgcaagtgtacctccttttactggctccataacaattacaggcttattatgcttctctgccacctcgtagcattttctagattgtatgctttcattatcccaatctaaataattaatctgtaattgcacgaagtctacttctggatgctcactcaagactttatccaatagttctgcactatcatgaaaagaaaaaccaatattctttatttttccttcttttttcttttcttcaataaacttaaagctatcaaattttttagctacttcataatgtgacacgcctatattgtgtaaaagatagtagtcaaaatagtctacaccacatttttctaattgctcattaaaaatggtttcttgctcttcttttttctttaaagccattaatggaagttttgtagctatagtaaaactctctcttttgtgtctttttactagagattctctaagtgctatctcactttttcccatgtgatacacataggctgtatcaaaatatgtaaatcccctttctaaaaaagtgtctaccattttatttaaatgttccatatcaatagttgtaacatcattttcatcttttattggtaaacgcattaatccaaatcctaatttttttgcctccattgttttacttccccctttaaaacttgtttgttttttctctctactttaactattcttacaagtatataattcttgtataattatactttactacttggagttaacttcaagtcaatagatttttttatttttaagacaaatattataaaaatacagttctttaatattaatccattgcatgtttctttcaccctccaattctcaaacttcacaaactccaacatgcaaagaaatatatactttaagaaattcagtccattaatattactacaaatactttttagatatgtttaaaaagaaatttcacctaaaatatttataaaagatttagaaataggtcttgtgtctattttaaaatatataaaacagtggtaaagacttatttataagataaaaaatgaatagtgtataccctttttaaaaagttttttcctttttatatttgtgatacaatgttaaatataaaaaggaaaattttgtattaaagaaatcttatttgttgattttgtaacttcaaactcagtatcaatttgattttaagattatattttattaagtatgctaaataacaaatttttaaagattgtgaggtaaaaatatgaataataaaaatttagctatattaatatcaggtatgatgtttttttctagttcttcagcaatttttgcagacaatactacaaagcaagaaagattaataggtaaaacaagatatgaaacagcagtagaagtaagtaaattgggatgggttcaatcaaaaacagccattatagttaatggtaattctattcaaagtgcgctttgtgcaaatccatttgctaagctaaagaatgcacctatacttttagtaaacaacaacagtattgaaaattcaactaaggctgagcttaaaaggcttggtgtagataatgtgtacattgtagatagtggaaatagcatttcttctaaagtagaaaatgaaataaaatcacttaacataaaaataaataaaatagtaggaaacaatatatataaaatgtctacaaatgtacttaaagaaatagataagataaaaaaggtagaaaatgttgcagttgtaaatggactaaagggattatctgatgcagttagtatagcttctccagcagcaatacataatatgcctataatattagtatcagatgaaaacagcaatgatagtagtataaatttcttaaacaataggtctataaaaaaatcttacatagttggaggaaataagattttatcagacaatacagtaaagaaatatccaaacagagaaagaatcagtggttcagatagaaacaatactaatgcaaaaattattgataaattttataaagataaaaaaataaataatgtatttgtagctaaagatggtattaaccaagaaaatgcattagtagattcattatcaataggagtattagctgctaaagaaaattctcctataatgatatctaatggtagccttgtaaatagtcaaaaggaatttattaaaaataaagatatagatgaaataacacaagtaggaggaggatataatcaaaaagcatttgaagatattttaaaactaaaaaatgtgaacataagaaataaaactaaaaaaatatctttaatacaggctaaagaaatattaaaacaagctcttccaggaagcgatattttagtttgttattatgatgaagatgataatgaatatgactgcaaagttataaaggataatatcctatatgagatagaaattgatgcctactctggtaaaataatagaaattgaaaaagatgatgacttaaatgataataatttaggtacacaaaatatatcattggataaagctaagtctatagcattagatgctgttcctaatggtaatttaatctattgtaaatatgatgctgaagataacgaatatgaggctaaagtaataaaaaataagaaaacatatgaattagagataagtgcatttgatggaagaattgtagatattgacatggacaatgattctgatgatgactttgatgataatgataagaataactctaatactaatgacaacagttctattattagtgctgaaaaagctaaatcaataatgctagataaagtgcctggtgggaaaatagtaaaatttaagtatgatgaagatgacaaagaatatgaaggtgaaataataaaaggaaaaattgaatatgagataacaattaatgcaattactggtaaaatattagaatttgaaatagatgattaataaaaaatatatattctattaattattacaagcaataaagccataaatattgaatttttcaatatttatggctttattttattttttttaatttaaatctacattatgccattatatatctatgcactcttttaaattaaaatcttgtccatcatcccaaacctaataaagttagattttaaacaatatattgtgatataagtaatttgtgtagaattattgcgtgatttactcatgaagaaacaataaggttaatatataatttgactatattaagacgaaaggagacatatacaatgaatacaatattaaaagtaaataacataactaaaacttataataaagggcaacagccgagtttagataaggtatcctttaatgtatcagaaggtgaatttataggtataatgggagcttctggctctgggaaaacaactctgcttaatgtattatctacaattgataaaccaacaagtggagatattttcataaataatataaatttgaaatcgcttaatgacacttgtgctgctgattttcgtaaggataatttaggctttatctttcaagagtattttttactagatagtcttacaattttcgagaatatttcagtacctcttacacttcagaaactcaatccagataaaatagaaaacatggtaaagagtctagctgaacgatttgacatagcttctcaattaaataaatacccaaatgaattatctggtgggcaaaggcagagagcttcagcagttagagcaatagtaaaacatcctagtattctctttgcagatgaaccaacaggagctttggattctaattcagctactgaactactccactcactacaggaagcaaatgaggagttgaaaacaacaattttaatggtaacacatgatgcctatgcagcaagttttgcaaatagaattttgatttttaaagatggtcatatcattaaagaattaaataaacaaccgaataatagacatacattttatgagttgattattcaagaaattgcaaaattggatactaaaagataggaggataatttaatgaacattttttatatggcaataaagaatcttaaaaaaaacttttcattctattctctatatctactttcagtctcttttgttattactgtatttttcgcatttacttcattctctgttaataagataatgctagaaaaaatttcaactgatggtagagttgaatctatgtgtaatgttatttcgatatttttgatggcatttgtcatcttctatatggcatactcaaatcgattcttcttgagacgtcgtacaaaagaattaggcatatatgctttacttggctatcgtaagtttacaatattatcgctacttacctttgaaaatgtattaatttgtagtggagcttttattactggattggtattaggagcattgtcacataagggtattgtctttggaattacagcactacttaatttatcaattgataattcacagataccattttttaatataaatgcaataaacaaaacaattatctttatagcattagttgttttagtcttagctatatcaaatggtaaatttctttataagacttcacttgtaaaattgataagacatgaaaaaagtgcagaaaaaaaattaaagttcagaaaaattccagcctttatgggatttattatgattttaagtgggtattgtttatcactagatattcttcgtggagctaaatcagtatgggtaagtattggattttatcaaatgggcttgataactatgattatcattgtaattggtacagttctctttatcaattcctttcttccatatattatgcaaaagagtaaaaaaaataaacgtactttctacacagatatgaagataatagctattccaaactttatctatcgtatacgttcaaactctaaaactctaattatgcttacattactctctgctactactttgacagtttcaagtgttatggcactgtccttatactaccctattgcatctgtttcgcgtattgcaccttcagagatagaatttagagtagaaaaaaataaacaaatagaagatgtaaaacaaattgtcagtcaatatacgtctaatacagatgatattatttttacacagacaaatatttataaggtaaaatcttcatcaaaagaccttccatttgaatatgaaattggtacatctaagaataatttatctaatagtagttcttctaaagaagttatttcaagagaatcaggatttgaatgtatatctttttctgattattatactttattaaaggcacaaaatcgaacaaagctactaaaacaacttacccctttaagggataatgaatgtattttaatgaaatatcaaccaaataatgatggatatagtgaaaatggaacgatttatccattacttattaatggtaaagaaacacctgtagctgtaagggaaacatcattaaacaatgctatttcttttgccaatagcgttggaacacttatcgttaatgatagtatatatgagcaaatagcacaaaataaattaccaatgacaagcattttaagtattaatggtaaatcaattaaaaataatgaaaatttatatagtaatatttcagattatttagatggaagcccttatttacaaggatattctcacaggataaatgatttattatcaattaatagttctacatttctgttaatcggatttcttgtggtattattctttattgctgttggaagtattttatactttaacaatatatcagcaatttcagattcaacatctgattataagattttacagaaaatgggttatgataatatacaaattaaaaaaattattaaaaaacaagtattgccattttttaatattccgtttttacttggtatattggactgtatatttgctaccttggtttataagactgctttgatgcagaatttacttggaaattcattttcacaatacatacctgtgattattgcaattttcttaacttctgtagtgtatttgatatattatatacttactattaaatcctgttgtaaaattgtattaaaaaattaatatttaccaaatcgtcaagcttagaggtgtgacgatttggtatacttcatttataagtatttgatataatttaaaattatagattcttaggtttgatttagtcataaaattaatataattaactcataaggaggtgtataagattgacaaattttaatttaaaaatactatttttaggaaactacattctatcacttctcttcatgggaatatctacaagcactgaaacttatatgaatatccaaagcattattcccttaataatttcaacattattactcatagacatcacatatataacctcttgtaatgtccgagaaaataacattatttcattattttgtggattactagcactagacagttggtatttactcttatcatttgtaaccacaccaataggcactattatttttaaaatattaagcacagttatagtgtatgtctctattaaatttatatttttatttttgtttcaaggtagtggatacaatttccgtaagataacagatattttattgcttatcacctgcattggtgcaattgtaggagcatttatttctaacagaacgtatgcttgtatgtacggaatacagtttgttgttagtataataagctttttatatattattttttatcatttgaaaagggttgtttttgtcataaaaagcgaaaaaaagcctatatcgatttcagtatttataacaattataggattccttacttattatttttttacactaagaatatcaaatcatattggtaattttggaatctatctaactgtattggtattttttatgagtattcatggtattgcacttaaagaaaatgatagttttcctatttcaacagtttttaacataaaacaaagggctatatttctttttataagtattttagtaattagcttggtcgtactatttgccaatgggaatttttctataatattaatagctataaatgttttatttatgcttattttcctctgtaacattattttggagtttaaccttagagatgaaaaaaataaagtagttaaaaatagcaagtatacttttgcattagaaaaattacaacaagaagaacaactaaaaacagagttttctaattttttacatgatgacatattacagaacctgctttcaataaaaaacatgatgagtaagtcatatcgcccagaagttcaagatattatatatgaaacacttaacaatctaaatacatgtataagaaatcaaatgcaagactatcatcctgttattttaaaaaatttaacagtaaaagaaaattatcagaatttaattgaaagtgtttcttcatcctttccacaaaaaaacatttgtgtttcatttaagtgttctgatactttattcttagttgaaccatatgatatattgatatatcgactgattaaagaattattgacaaacgtgtataaacattcaaatggtagccatgcatggatagctttagcactagaaaaaaatataataaaattaaatattaatgataatggtgtgaaaaatacatcttttaaaacacctttagatataactaaaattacttttgatataataaaacacaaagggattatatcaattaaagaacaagtagaaaatctaggaggaacgataagtatttctgataatatacctcatggagtttgtgtacagattacaatccctatgaaaggagatggttcttataaatattttgttagttgatgaccatatgctttttgctaaaagcttgtcaattgcactagaagaatacgaagaaatcgaacagttttattccacacaggacatccataatctttcagaaatgattcaagataaaaaaatagacattgtcttaatggatataaaccttagaggcttaagtgaatgtgatggcttaaaagtagcttataatttattagagactaattcaactattaaaataataatcttgactggatacgacctcccagtttataaacatgaggctaaaaaaataggtatctatggattcctaaataagaatattagccctgatagtttaattgattcattattaaaagtctatcaaggggtaacctgttttccatctgaaaatactgaagtaattattgaagatttaactaatatggagaaaagaattttacagcttatctgtagtggtaaaaaaagaaaaataattgctgatgaattgtatataagtgaaagaacattatcaaatcatttacaacacatatatgacaagctagatgtttcatcatcagttgaggctattacaaaagccattaaaatgggttatatttctccagtatattaaaaaagtgagtgtctcaaaatgaactttctagctcataaggcactctcctttgtattaaatcaaatatattttcatcatttaaacaattaagaagaggcttctctctattttgagacaactccattttaatacactatttatatttatatataaacatattttaaacaactaaaaagcaactaatatctcaatacatatcttcataacacatatcaccataattacaagcagataaagaactctcctcatttaaatacgactcaaattcatacccaaacagaattgttggttctatatatatttccatatctgtatatctccatcttcttacctttgcctctataaccttgtaaaaatcttctaaactatacccttcttttaatcttttatctataagtgccttagttatactcaaatcagctttaaaattttttcctgattcactatttaattttcttataataatttcatgtatgctttctggatttttataagtagaatcttcagtcaaatcttcatccaaattttcaaaggtatttttatttaaattctttttatttaaattattttttaataattcttttttctttgtctcattttctgtttcatacccagtatgaattatcaaatcataatctttgtctatactctcttgatttatacggctgtatgtgttggtattactgttcttgaacaactcatctctatgtttatatttcattgttttttggttattgttaatagttgcatcaatgtatttctctatatttttgaaaatatcactattctttgttacaatttctgcattactattttcagaacaaacataactatatacagaacaacaatttccctttactcccctacttattaatctcaatatacctaaatctataaattcatttacaagtctacttattgtagatatagatacatcaaggtcagatgcagctttccttactgtcatcataaattgtcctcttggcagagttccttttaatctttgtatattttcttttctcattacatagtgattaaaccttattctatttacatctcttttttcattaaaatataatactgctgaatttaattgataaaaactattactcatattcccactcctccaatttaaatagataatttgttgtaaagtttttagatttttaaataacttattaaatgattatttttattaaaaagtattctttgatattttcattttaaagttttaagtataataagttaatagtgtagatttaacttttttatttaaacaataaacttaatattatttttaatataataattttattaaatttagtatgtaattttttaatcttattttattccctctatactcttatgctaaataataactttgataatatttccctaacttatgtttcaactggtttatattgcaatttatttaattacagcttatttgcataataattcgtccatatcataagttgtgtatttatataaatacacaattaaaaataaatcactatggtatactaattattacgaagactatacttatatgcaaaaataaatataaggcatcttatatcttttattaattataaatatcttttatcaattataaaaaattaaacgctatcttatttatcataaattgcaaaaacataaaattttattactatattgctataaattaattaatacacattttacacaataaggagggctatatatgacaaatgctaaaagtaaaaaagaatatctaaatcgtatttgcaaagtgcaagactatatagaagaacatttacatgaacctctttctcttgatgaactttctaatatagcaggtttttcaaaatttcattttcatagaatcttcaaagcaatagaaaaagaaactttggcacaatatgtaaataggctaaaactagaaaatgcaactgcttttcttattcatcgaactgacatgactgttactgatattgcacactacttcggctttactgattcagcagttttctcgagagcatttaaaaattactataaaataagccctataaaatatagaaacaattatagcaagaattgcaaagaaccatataaaatttctcagtacaatagaagcatatcaaaacctaaatgtaagaatactagagaggttaaaggtgaaattgaaattctagaacttgataatatgaatactatttacactagatatactggttcatatggtaatctaaccagtactttcccaaaacttttagaacggttattcacatatgcaagtgagcagaatctacttggacttgaaaacacacaaatattagccatttatcatgataatccacaatttacacaggagcatcaattaaggactagtatttgcatgaccattccagataacattgttgtcaaagagaatgacaatcttggcaatatgataatcccttctggaaaatatcttgtgggacattttgatatttcaaaatctgaatatagtgatgcgtgggattttatgtataatgaatggctatcaaatggtaattataagctacgtgcctccttcccttttgaagtatatcttaacaacccacacaatcaccctcaaaatagacactttgtcgatatatatttacctatagaacctttttaataacctcacctaatctattcttgtattaaggattaatatatccctattttacggtttgataaaattgataaaatgaggtgaaccaatgaaagaaataaaaattaatggagcaaagatacacaatcttaaaaatatagatgtttctatccccaaagataagcttgttgttgcaacaggtgtcagtggctcaggtaagtctagccttatgtttgacattgtatttgaggaaggtcgtaaacaatatctgcaatctttaggtatacttgcaggtattgatagtgaggataagtttgataatattcaaggtttagctcccactatagctgttcaacaaaatattattcgccagagcaatcctcgttcaacagtaggcacaagaaccaatattctcaacatgcttgcactattgtattcagtagaaggtcaaataatgtgtactatgtgtgatactcctgtaagcgataatctaatttgcaataattgtgggtatgaggaagaacgattaagaccaagttatttctcatacaactcttcagatggaatgtgtatgaagtgctctggacatggtgcatattttgagattaatattgaaaaattagtccttgataagcatgataccctaaaacaagtcttagatagagcaaagattacaccaggatatttgagagtattttctaaaaaattcaacgattatttagacatacaattcttacaactacctgaagaaataagaaatgaagtactctatggtcattatgaaaatggtaaaaaaagttcctctttatcaaaggtatttcacaatcgttacaaaaggggtgaggatttaaatggagtttatactatgactgcctgttcagattgcaatggttttaaaattggtgaagaagcacgtagagtacttttaaacggaaaacatattggagaacttggaaaaatgacgattttagaaattgatgatttccttaaaatcttaataaaccaaggtaatttaaacacatttggtacaaatcttgtaaatgatattttatccaaaactcgacatttaatagaatcacgattaggtcatctatccttataccgagaaatgtcaactttgagtggtggggaaatgcaaagactatttttaaattcacatctcgattcagagatggactcattaatttatgtgcttgatgaaccaacagctggattgcatgaatcagaaaaaatagacatcttaaaatcaataaagaaacttaaagatttaggcaatacggtcatagtagttgagcacgataaaaacacaattgaaatggcagaacatattattgatattggtccaaaagctggtgttgaaggtggtcaattagtatatcaaggagatttagaaggtctacttcaatccgacaaatcacttactgggcagtatctatctggaaaatatccaatgcctaatagaacaagcaataaaaatattacacatactgataaaataccttgtataactattcaaaatgcaaatacaaataatcttaaaaatgtaactgtatcattacctttgggtgctatggttggaatatctggaaaatcaggtagtggcaagagttcacttatatcagacaccctacttcctcttcttagaagccaatttaataaccatactatcaataatcaaataaattcttcagatagcgaaataggtgatgaagacgattatgcagttattgaaactattgcagatagactgattggtactaaacatatttctggatattcagagatatctcaatctcctattggcaaaaatatgaactcaactcctgcttcttatattggtatatgggataagatacgtacactatttgcaggtcagccagaatcgttagaacgaggatttacagctggtcatttctcatttaactccaaaggtgcttgtcctaaatgtagtggtagtggatatgaaaaggtctggttaggaaataatctaagtatagaccatatatgcagtgaatgtcagggaaaaagatttaatgatgaatctttatctattaaatataaaaataaaaatatacatgatattttaaatatgagtgtttctgaatctgtacatttcttcaaggatattccaaatattgtttcacacttaaatgtattagaacaaataggtatggggtatataaaattaggccaacctacaccgactttaagtggtggtgaatcccaaagaatcaaacttgcaaaagaaattggtaaaaaacgaaatggtaatatcctttatgtattggatgagccaactactggtctaagtctatatgatacttctaagttgattcaattattagatgaattggtggaaaatggaaattctgtaattgttgttgaacatgatatagatgtattaaatgtttgtgactggattgttgagcttggtccagaaggtggtgacaaaggaggttatataattgcagaaggttctccaaaaactctaaaagaaaatccaaaatctataacagggaggtatctttaatgaataaaaacaattgcttagatttaatatttgaaaaagtagacccttcaagtgttggcatgagttcagaaaagctctcacaactggaacctttaataatctcacaatatagtaatataaatggaataattattgcaagaaaaggaaaagttgtctttgaaaagtactataatggatataatgctgatgatacttttcatgttgcatcagttacaaaaagtattatatcagccttaataggtattgcaatagataaaggatatataaaagatgttgaccaaaaggttgttgattttttccctgaatatacttgtagtccttctgaaatatgtaaaaaagcagtaactatacgtcacctacttacaatgactgcaccatacccttttaaaaatatgactgagtctttagaaagactttgcaaacaaaaagattggataaaatataccttgaatcaacttggtcaaaaaggcgaaattggtactttcaaatattcttcagctggaacgcacctactttcagctattataacaaaaactactggaaaatctgctcgtgaatttgctaatgagtacttatttaaacctattggtatgaaagttataccagattatgatatgaaagattttggttttgaagatttctttggaaaaaatcttaagggttgggcaaaagatagacagggttattctataggtggctggggacttacattgagtgctagagatatgttgcgatttggttttctgtatttaaatgatggtatttggaataataaacgtattatatctaaatcgtggattgaagaatcggttaaaatgaatagtaatgaatacggttatctgtggtggatatgtaaaaaagatggtgttttgtggtattcagcaatgggaactggaggaaatgctatttgttgtattccacaatatgacttagtaatagccataccatctaaaatagtgtttaaacctcgtgatagatgggagtttattgaaaaatatatacttacttctataatagattaatcactcttagataaactaattactcttagataaccaaaccctccactataacaccagacttttgtttggtgttattatgactaatactatatatctaaaaggagttgaatactaatggacacttacacgacatcagaggtagcagatttaattggtgtacatcctaatacagtacgtttatatgaagaactaaacttaatacctaaacctaagcgtaataccaatggttatcgtatctttaatgattttcatatagaacaatttagatttgctcgtacagccttgaaaattgaagtggtacaaaggggattaagaaaagatgcccttgagattgtaagaacatcagcgaatagggactttgataaggctattagtcttgtaaatcaatacttgcaacaattagaaatagaaaaatctaatgccgaggaagcacttactattgttgcacagattttaaatggaaatactccagaaacaaataaactctttttaactagaaaagaaactgcagaacacttaaatgttacaatagatactttaagaaattgggaaatgaatggtttgttaaaagtaaaaagaaaacaaaatggttatcgtgtatatactgatgaagatataaaacgacttaaaattataagcgcacttcgttgtgcaaactattctctttcagctattttacgaatgttaaatgctttatcttctaatcctaatactaatattaaaactgtccttgacactccaaaagatgatgacgaaattatctcagtgtgtgacaaactgataacttcattgaaagaagctgaacataatgcaaaaaccatgaaatctcatcttcaaattatgaaaaaacaattttcctagccctccactctaactccagactttgatttgtgtgttatccttaagagcaagaaaaattcaacacacaaatcaaaggaggaataggatggaaaacaaaaatactaattctacatggaagaaaaaagtcattctttttttagcaagtcaatatatttccttatttggctcatcacttgtacaaatggcaatgatatggtatgtcacacttcagacatcatcaggtgtatgggtaacagttttaactgtatgctcctttatacctcaaatgataatttctttttttgctggtgtatgggcagactactacaatcgaaaggtactcataattgtatcagattcaacaattgctatatctacattagttctaattctatttatgatgtcatcaaatggcacaacaagtgaattaatagccatatcagtaatatctgttatacgttcactaggaagtggtgtacaaacacctgctgtaaacgcaatgattcctcaacttgtaccagaagaacatttaatgcgttttaatggtataaatagtagtctacagtctatagtacaatttatagtgcctattgtagctgctgcaatacttggatttggtaataaaataaatcaagttcttttaattgatgtatttactgcaattattgctattgtattattgatattcatcaaaattcctaaacataatataccaaaacaaactgaaaaagtctcattttttgcagatatggtatcagggataaagtactgtttttcagataagttcattagaaaagtgcttttcacttatggagcattcatgcttctttgtgttccatcaggatttcttataggacttcttattgaacgaacatttggcaagggttatatatacctgtctattattgaaatgattggatttttagttatggttttaggtggattgattataggagtttttggtggttttaaaaatagaaataagaccttttttctagcaatattatcctatgctattttttcaattattctaggtcttgtaacacaagcttggcaattttttatatttatgttttttacgaatttttcaattccaattattcaagcatcagctatgactatgttgcaagagcatgtagcaccacaaatgctaggtcgagttcttagcttacctattattatatatactggttttattcctcttggtatgatgattttcggaccaatggcagatgtaatttctattaataatttaataatcgtagcagggattatacttttattttttgctttggctatcccctattcaaaacaattttacaagcaaggaatatctaagtcaaatgaatccgagtaatatatttaaatagtttaactcgatttatctggttaaaaatgagggggcttaaaatggactttttaatttatgaagaaaattttttatatgaaatcaaatatattttatcatttcaacattgaaaaataggtttatctttattttgagtccctctctttatagcaaataatattttgatactatctttattaactttatataataatacctcatataataatacctccatttatatcataaattaaatttatagtacaaatggaggaaaataaagtatttatatagtttaagtacctattaagttttccactaagtagctctaattgtactgaatttcttactaaattatattgaataattataaaataaaactaactattacactacataaattaaagtatacaaattgcactacataaattacactatacaaagtatattaaatcacctattaaattgtcccaattataattatactgagttatctactaaaagataactttctttttttatctaaaataatatatatcataaaccatactacacaatgtacaaccaaaattacaatatcttttataataataacattaccattaataatctccataataccattaaatgtagcaactgatggcattatatagcataaattccctataccgctggtattaacccctagaagatatattaacaaaggagcacctataaataaaatcattactattttaatataaacaattcctaccataagaccttctgacaactttccaataaataaacctataagtgatgaaataaatgctgaaaatacaacgagtaacaacatcattatcatatctaatattgaaatatccaaacatataaatacagttatcattgaagataaacacccacataaaagacccaaaaatactttttgtataatatactgacttctactctgtggcaaaacttcatttataaatgatattccatcttctttttcagatataatattcattgcattaaaggtacatcccataaacatagcagtaattaaaatcatagcaataaaaacattctgaaactcttttaaaatactatctttaggcaatattgtaacctcaacatcttttaaatcaccctttagtctaaacatctctggcaatgtctttccaacattttttatagcattaatctcatttccataaagcatagtttttattcctttaccatctctaacaactccaattgtgtccgttttaatatccttaatttcacgtattaaatgcatttttgtgtcatatacacttaccataccatacttcttcaaccactgctctgtttgtacaggaagtgtatccttcactataccaaaacgtatctctcctaatgaagatatatcaattgttcccataaaatttattaaaatcgccataacaactggtaaaaagaaggaaattatacacattttatctttttttatactctttaactggtaacgtaatcctatcaagattatccctccctaaccaactctttattaaaaatatattttacaagtaaaaatagaactattattgtcaaagaacacactacaaaataaactaattcttttgaaaaattcatgaaaaacgcatttttaagctgactataaacatgatagaagggatgatatttaatccaatctatttcaaaagatgtatttgcagatagaaatataggtgtagttatgaatacagcaaccacaagatatataagagaaaattgcttaaaatctctcaataacattgagcatcctattccaatcaaagacataataattgataaaatactagcttgaactaatacttgtggaagtatttttactccttcaaaaaatccaatattaaatactactaaaagaactgtaaaacataggtcacatatcaaaaaagcaaatatctttgataatataaaaagacttctttttacaggtaaaataccagtaatacgcattactcccatctgcttttctttaaataataaagaggcaatccctaaaaatccaatagctacaatttcaaagaataaaatctcacaagtcatgtcttttctttgttttatctcagatgtatccttatcattaatttgaattattgcattgttgtctgatattttgctattatggtctttttctgatgataataatgacaatgcatagtcagctctataattgtcaactcctttaatactttcatgtaaaattactttcggcttactggaactcatatcaatacaaactgcacttgtatcttcatcaagttttgcttttaattcacctatagaagaaacttgattaattaatggagatgcactcatgcttatattctctggattatatagatatacattattgtgataactatcttcatccataaactttacataaccaaaattaatataacacgaataaagtatgagagagccaagtgtcagcacaaaaaatttaccataaatcatcatccaaaaatctttttttactaaggtaaaaaatttagaatacattacactaacatccttcctgtgtatttaataaaaacttcttctagtgtaggttcttttgaatgtacacttaagatttcatcatatttaaaagttattccagattctaactcttgtatatctacaatttcaatatctcgatttccattatatacaaattccacttcaactttattattgctatttttcatttttaaatttttgggtttatctattaccataatcttgccatctgcaataaaagccacattgttacacattaaatctgcatctagcatattatgagtagtcaaaaagatagttgttcctttttttcgttcttcttcaataatcttacgaaatagtacagctccagatgggtcaagtccactagtaggctcatctaaaaataacaactttggattacttaccaatgctcttgccatgctaatacgttgcttcataccttttgagtaggatgatacaggcttatttataaactctttcttaaactctaacaaatctaagagttcatatatgtctctcctttgatttttaggataaaaagacgaaaaatattctaaattatcaattgcacttaaattggtatataaataaggaaattcaaataaaacaccaatcttttgatatagagactctgtatatgctttaacttccttcccaaaaagggatacgtgcccattgtaaccttttaaaacgccatttaagattttctgtgttgtggattttcctgaaccattaggtccaaggaatccaaagatttctccttcttttacttcaaaattaagtccatgcaatatctgtttatcttttccataagaaaattttaactctcctacttttatcatctatcataacctcctttatcatttttttgtcgtctatcccaccattttataaatttaattttaagcggaatagaaagcaatattatcaatataatagtcaaccatgtataccatttcataagtactcccccttgtaaccttatttaattacgcttctattttttaatttatttaacctattttatttctatttggtgaaatcagagtgtctctcttgtgaaatcgaagtgaaataataaaaagcttaataaaaaatcttgttttcatcaggaaaacaagacttttcattaaactttttattagactttttcattaagttttttattttattctctttaaatacttacgtatacaaagaaaaatattttacatcagatacttataatttataaattaatactaaattattcatcaattggaatcataaaataaaactctactcctctatcacgattattcactccatattctaacccttgcattgtaagtatttgtgaaacaattgcaagccctagacctgaacctcctttacgctgagattgaacactacgataaaacttagaccaaatctttgaaatctcatcttgctctataatcctaccatcattataaatttcaaataaaagcaagccattttcacatgtaatcgataaatctaaattaccattatatacaacatgcttctttgcattaataattagattctctactacttgttccattctcattttatctgccactacaaaaacttcatactctggcaaatcatatgtaaaataaaaattggcatctggtatatcaattaaaagacgacctgccacagtttcaacaaactctataaaatcaaaacgctctgggttaagtttagaaactcctgcttccaatgcagataagtctaataatgatacaatcatattgttcattctatcagtttcttctattataacattcatataatttttctttttttcttcatcaacttcatccataagcccctctgtatacgcacgtataatgccaagtggagtcttcatttcatgtgaaattgcatctaccaactcctttctttgttccaatagcattctttccttatttacatccttttcaagttgaatatttgcactttctaggtctgataatgcctgttgtagatttgtagacattgtattcaggctcctagaaagttctccaaattcatcattagtatttacagtacatggattagaaaaatcaagttgggacatactttttgcagatttatttatagatgtgattggttctgaaataaattttcccaataaaaaatcaatactcataataaatataaccagtattataaaccaaatccaaaattcaaatttagagtttatcgaaaattcttcaacaaccagataaaataatataattaacgctcctgataatttagaaagtaaaaacactttttttctaactgaatatagtccaaaattttgtttaatccaatttgaaatatctacatttttcagtttttctataatctttcttaaactattcattccttaacctcaaacttatatcctgaacgaattaatgtaactatatggtgtccttcactaccaagctttttgcgtaaggtttttatatgtgtatctacagttcgtgtgtttccttcaaaatcatatccccatatacaatttaaaagcttctctctggaaaaaacttgattagggttttccataaataaacgcaataattcaaattctttatatgttaaatcaatcaatttatcttctacatacacttgccttgatgctaccataataaaaatctttcctaaactcaatgaatttttgggaatatcagtagtgtatctacgtaacaaggcattaacttttgctaaaagtacttttgggctaaatggttttgttatataatcatctgcgccatattcataaccctttaatttgtcctcctcttcacctttagctgtcaatatgataataggtatattagtcatttcacgtgaaactctacacactgaaaatccatctaaatacggcatcataatatccaatatcattaaatctatattgttgctctttaatattgtaagtgcctcgactccatcattagcagttatacaagtatatcctcccttttgcatatattctacaataatactttgcatccttttttcatcttctacaactagtattttagccatttctatttatcacctcttttttgtaggctttattttagtttatattaatttatttatttttcaactatttttttatagtatttttatagtattttttatagcattttgatagtattttttagactattcttaatggaattgatatcatagataaaaatagcctactaactttttctatgttagcaggctaaaatatttctaataataattatattattttgtcactattctattttttcgattaaaatacattctaaaacaaatatcttcaattaatgaataaattgcacttgttataaagtacagacctatggctactggagttctaacagttagtataagacttgttatggtagtcaccacagccatttgtttgttaaactttacttgagaatttatttttaaatatggtatataattcactaaatttgaagctaacataattaatgtatatatacaaggtaatataaacaaattatcaaatgtacctaaattagcaatccatggaattataattgttgtaaattcctttgtcatatctaaacatacatgatataaagcatatactactggcatttgaaccaaaactataagacatcccagcatactcttcatactttctacagaacttacttgtatttgcttttccaattctttagtatcattcttatacttttcttttatatgttccattttttcagctaattcttgctgtttttttacagaaaatctttgttttaatgatagtggcataagtactaatttaactattaaagttataagtacaatagaaattccaaaatcacctgtaaaattaaataatatacttaataatccttgcaatatacttgaaatgaaatccattttattctctcctttttatttttaaactttagaatttataatagattcatttcaaattaaaacaaactacaatacctccaaatatcatatttctgaaaaactatatactgtttaggcaaccgttcttcagaatatgtaattctatttacaaatatgtctcttattaaaacatacttaattttatgatttaagaggtctttacaaaaataaaatatacttccaatgatagataccaataatgtcatataaattagtacatataacatactatccatatctaatctcatcacatcacctcttcatcacttatatttatctttagacaatttcaaatcctaaataattccaacatttatatttagttttaaatataaataattatagtatagaaaactcctaatgtaaatatatagattattatatttatcatttttattcgtcatatttacatttataaagtatataatcttatcactcttaatttttaataaaaatcacctaaagtattcttttttatctctgaacaaaacaatattgggtttttatagcttatttttaaattataatccttaatttaatataagggctcaatataataaatcttaatatatataaatcctaatatatatctctcttaatataatattaaatacaacctttcatacaattttaaatataatgtctaatataatcccttagtataatcacatactttttgatacaatccttaatataatcgttaataattgtatactaaaatcaatgactttttttctgattaatgctaaaataattaaaaatagaaaataaatagatttttccaaaaaataaacggaggttacttaaaatgataagtgattctatatcaaaaagacgaagtatcagaaaatataaaaatcaaagcatttcacatgaaactatagagaaaataattgaagctggaataaatgcaccttcatctaaaaacaggcaaccatggcgttttgttgtcatcactgaaaaggaaaaagaatctatgcttaaagccatgagcaaaggtattcaaaatgaaattaatgataatgggcttcttccaggaagtcgtcaacatatcgctggtgcaaattacacagttgaaatcatgaaacaagctccagtaacaatttttattttaaatatattaggtaaatcacctttagaaaagctatcccctgaagaacgattctatgaaatggcaaacatgcaatcaattggagctgcaattcagaatatgtcgcttacagctgtggaattaggtctaggtagtctttggatttgtgatgtatactttgcatatcgtgaattatgtgaatggttaaatacagatagtcaattagtggcagcaatatctttaggttatcctgacgaagaaccatcaagaagacctagattacaattaagtgatgtgactgaatggagataaatagttatagtaagcaaatagtgcaaacagaatttatattaggtgaggtattttgatgaaaaaaattattaaatcttttacattttgttttttttaattgcattatttgagatttatatccaccaaattggtcaagactcaaaaagtattattctaataggattaaatcctattttgtctattatttctaccattgatagtttttttgtttttatggattcaggcatgcaaatcccatgtagaacaattacagggtcaatttcgatttattggtacatagcatctatactttcttttcttatttatggtataattttagatttaattagaatagttatttccaaaattggaaataaaacaaaataatcatcataaatagtgcattttcttgagctattaaacttcaccggatatagagacataacatatacttagcttcagaaaatgcacctttaaatcttcatatgaacattattttacttacattaatttaatgttacttaaaaattaatgtattgtatttctttaaattaattttctatatttcttaaattagtttattatacttctttagattaattttctatacttcctaaattagtttattatacttctttagattagctttctatacttcctaaattagtttattacacttctttagattaattttctatacttctttaaattaattttctatacttcctaaattagttcattatacttctttaaattaattttctatacttcctaaattagtttattacacttctttagattaattttctatacttcctaaattagtttattatacttctttaaattaattttctacacttcctaaattagtttattatacttctttaaattaattttctacacttcctaaattagtttattatatttcttaaattaattttctatacttcttaaatattgtcttatacctctgcaatcttattatggttactcatcaaattattttgctttatagtcaaggatttcatttcatgaactgcaaagtatatacataccattgccgctgctgcatctgctattggtcctgcaaacattactccatcaattcccataaacattggtaaaattactatcaatggaattaaaaataaaatttgacgagtcaaagaagtaaaaagtcccaacactgatttcccaattgatgtaaagaaagttgatgatactatttgaacaccatttataaatgttaagaacaagaaagttctaaaataatgttctgcaaatataaaataagtctcatttccgttaccaaatatagacgtaatttgtcttgggaagaattggaaacataagaatgcaataacagatataatagttgcacttcccactgcaaacttatatgcttcttttacacgattatacttttcagccccataattataccctataattggttgcataccttgtgatataccaataattatagatataaaaatcatatttactttaataatgataccgacacaagcaagtggaatctcacttccataaactgacctagccccataatatgccaatgtattattcataactatctgtgttacagtcattgctaattgattaaaacatgagcttgaacctagcgcaaatatatgtttataaattatactatctaatttaaaacttttcttatgtaatttaatatgttgaaaattctttatataatgaacacttattccaaaagatataagttgcccaataacagttgctaaagcagacccagcaattcccatattaaaaacaaaaatgaataatggattcaaaattgtattaataactgctcctattaacatacaaaacatagaagcttttggtctcccatctgcaagtatcaatttactcattccagtggacattataagaaatggtaatccaattgatgtaatttttgtatatgtgtgtgcataaggtagtatttctgatgtagagccaaagaattttaatagtggtgttaaaaatattgatactactataaataaacttattccaaaaacagccatcaagcatatagaatttcctgctgcttttgtagctttttctgaatttttagcacctaattccaatgaacacttagacgctcctccaattcctaataataatgcaattgcagtacatattgttgttagtggaaaagtgacatttgtagcagcattacccaatacaccaacaccttgcccaataaatatttggtcaacaatgttatataaagcacttactaacattgctataatactaggaattgcgtacttagttaataactttgaaaccttttcatattccaatggctccttatatttttcttccattttccttcgcctccaattttgcttcttcattcatatcaatagctaaaaatgcaactttctttaacattgacataaacaactcttgctcttctttctcaaatgaactcaacaactcctcaacatacccatttgttatttttagtatttcatcataacattctaaagatttttctgtaggatataaatgccatgttcttttatcctttacacctggttctcttgttataaagccttctttttctaaatttgccaaagctctcgttatattactaggattcacaagaattttctcaaatatagtgtcctgtgtaatacctggattattacatatgtgtaatacataaaaatattggctattattgattccaatatccgccaatttcctgtcaatataatttgtattgtatctatttataatggaaacccattttaatagctctctcatattctctcctttaatatctattgtcctcatttttttgcgttcgcaataatctatttgctcatgcaattattttactgctaattttatactttgtcaatagcacacaagtttatatttaaaccataaagttactataaattttatatattagactcttactttaatttaactatttttaaatcttcattgatatttaattaccttttatattaatttttttgcatatttatcaataattcctaattctttttagcttattttaaaaagcatcttgacgtaatatttattatctgtaataataaatatatcgaatcgatatatatctgattgataccaggaggtaatatgttagaatacattattttaggatttttaatggaaaaagaattaagtggatacgacttaaaacaaataatgtcagaaagtacctcgtacttttttgacgccagctttggaagtatctatcctgcacttaaaagattagaaacaaaaggatatatacactatcacgaagttatagatggtagcaaattaaaaaaactatattccataactaatactggtaaagaagtatttctcgaatggttaaagaaacctataaatttttctaaaacaaagcaagaccaccttgttaatatattcttttacaagtatctacccaaagaaataattgaaacaaacttaaaaatgttaataactgaagtagaattacttctaaataaattaagtaaacaaaaaattgatgtagaagaaaatcattgtattgaccaatatacatatatgtatgccacaatgatttatggagttgactattataattttgttattaattggtgtaaagatttactgaaaaatctataagatataatttttagaaataaacatacataataaaaggagatggactttatgaagcttttaatacatgatttaactgacaaagaattagaaaagttattacccaagcttgatgacaatataaaaatacttccaaacacaaaagaaatccacaaatgtattggtcgttttggttgctggattaaaactccttctgaatgtgttgtaaaagattattacagcaacatgggtaaacttataaatgaatccgatggaattattataataagcagatgctgttacggagggtttagcccttttgtcaaaaacgtacttgataaaagcattaattatattcttccatactttgtaataaaagataatatgatgcgtcataaaagcagatatgataaacagataaatttaaaagctatattctatggagattgtattacagaagctgaaaaagaaactgctacgaaattagtaaatggaaatgctataaatttcaatataaaagaacactctgtttgtttctatgaaaatatacaggatataagaggtgaatccatatgaatatagtaatgataaatggtagtccaaaagtaaataaaaataattcacagtattttttatctgaattaaaacaacttattcaaaatgataataaagtttttacatttaaagtagatagcacatctaagtatcctgacgctcttaatgccatacttaattgtgatagattaataatagcatttcctctttatgtagatggtattccatctcatttacttcattttttagagaaatgtgaaaaatttttaaaaacacaaaataaaaaacctattccagtgtatgcaatagttaactgtggattcaatgaaggtgaacataatcatttggcaattcaaatgatagatcattggtgcaaaaaaatcaactttacatgggttcaaggtattggaattggagctggggagatgtttggttcactagaatccgtacctttgggtaaaggacctaaaaaagatttaggaattgcattaaaagaactttcaaaaaatatacttagtgataatatacatatagatgattccaacaaaagtactatttttatttcacctaacttccctagattcctatataaacttatggggaatcatcaatggaatactcaagctaaatcaaatggattgactaaaagtgatatactaaagaaataaaattttacttcaacaaatactaaaaaccgtcaagcacgaataaactattcatcttgacggttttttatgttatttatattcactagacatgggataattcactacaacattgattatctagtctaatatttatcttattctttttgtaaaatccaagttgctccaacaaggtcctgctgtaaatcagtatattcatttttttggctaataacatattgttcaaacatatctttttgagaaggatattttttaattagctcatttgcacgagttataatccagttcatttcctcttcaacatcattttcaagttctaaacatggtatacattcaattagtttcagacctaattctttgaacaatatacaccactcattgtaagtgggatacaccctctcaaaattaagctgttcatttgtagatttatctactacatatgcatcatcaattaaaatgaaccccttactttttattgtaggtaatagcttacttatagtttctttataattacctaaaatatcccctacagctccaaaaatcacacaatcataatcgtgctcaatttttacagaactattagcatcattcatttcaaaatcacacaaagcatcaaccttatattcaatagcctttcttctcgcataatcaataaattcaggtatcaaatcaatacctttgatatgtatattcaactcttttgcaagcttcacagatacagcaccttttccacaagctaaatccaaaacttttgtatcctcattaaaaggtatatgctttctaaataattgtaacatttgttctggtgaacttcctaattcccaaaaatcttgtaataaataaggcaaataaggtaaaatatcagtagtatcagaagttagtgactctgccaatttttcttttacagtattattcattttttcaacctccaaaatttaaattattattcaaaagtaatattattttatatacttcttcataggtactacaaacagtggaaaatgcttttgacctttgtatttttcaattcatttcttttctttatgagctgtaataattgtataactgtgagcgtttactgttataatacaatcatatacacttatataccagttttttccctttctattaataatggcatttggagattctattttagttttacaccagttcactacatcatttgtctccaaagaaagatttttcttaattcttacaacgcctaactctgttgtatgcaatctatctaggtttttaagtaattcgttttctacattcatttttattaaaacactttatcctttgcaaaattaaatctattatttagtactattttatcatagtattgtgtattttatcataatcttatagtaaaactatttctttcctacagactataaattatttataaatacatacttttataaaactttgcctatataaatccacctactttatacataatcccttcttttaaatgattggaacccaaaactgaatttcactcaaaccattcttatcagttttttctccgtattttacaaaatcatataaattattttcattaaactggcaacttgaattaaggaaccattcttgatagatatattctacaacattttgcatactatcctcatttttcccaataaaagtaaaaacaatataattacttttcggtaatacgaatttttccattccattaggaatttaccaaaagtagctacttgaacacctgcaatatatgtaaatgtaggattattttcaatttctttaaaattactataatcattaactccaattaaaaaatccaagtctaccttgttttctatcaactctttatttttatgcaaatccctccaacattttccaataacatgaaatcctttttttactttaccagaatagccaacaatatttatatctgtacaattaacttttttaacatctaaaaccatacctccatgtaacctttttctattattaatatcaaattttaattgtagtggtaaaaaatcttgatgttttctaaaaaacttagggctatgcttaaacatttttttaaaccctgttgaaaaagaacgttgtgtgtcataccccgagattaaagcaatttcaataattggtttttctgtaaaaatgagcattcttgctgcttcagttagtctacgtctttgtatataattatgtatactaaatccgacaactgatgtaaacattctatgtaaatggtactttgaatagcctatctctttagaaattacatttaaatctaacatctcatctaaaagatgtttttctatataatctaaagttttttcaatggtaatcaaattgttatccatatagcacccctcctattttaaagatagcatattattttattttgtttttcacattctttgctaatattttgatttattttatggcacacaaaagacacttctatttgaagtgcctatctactctgtatattgagcttcttatttcaatttattataatcttcaatagatacaggttctagccatttattgaaagcaccttcagcagttacctcgtctacagccaactgctaaattctcttctataccttaatctaacttttccacttcaagtatacaacttgaagttagctctaaatcaatagtttttatcacaacaatttgattttaaatttaaatttattcttttaaattatcatcatctattatagattttcttatattcaataactggtctacaaattggttagcaggagtatttaaaatattctcaggagtatcatactgttgaacaactccatgatttaataccaaagtctttgttcccaaaatcaaagcttcataaatatcatgcgtaataaagataatcgtaactcctgtttttttatgaatttcttttatctctttttgtaattgctttcgtgtaatctcatcaactgcaccaaaaggttcatccattaataaaatttctggagaagaagctaaagctcttgcaatccctacacgttgttgctgaccacctgacaattctgatgggtaacgcactttcatatcatttggcaatcccactatttccatccacttgtttacagcactttttacttctaatttattctttttacttaggagatttggtacatatgaaatattttcttcaacagtcatatgaggaaaaagaacacttccttgtacacaatatcctattcttcttcttaatttaattaagtcctcgtttttgatatctgtttggtttatcaaaatatttcctccatctggcaaaatcagaccattaatcatttttaagagtgttgtcttaccagaaccagacgaaccaattacagtcaaaaactctcctttttctatatctaaattaagattatctattatagttttatcattatattgttttttaatatttttaaattgtataataggtgtcattatatttcctccaatttataaaagacctttcttattcagaaactcacaagcaacttctctaggttctaaattgttgttttctacgtcataattcattttagccatttctttatcagtcaaaatatctccaaccatcttaaatacctctgatagttctggattttcctctaatacttccaaacgaacaacatttccacattgataagatgggtagaaatttttatcatcttttagaactataacatctgaaacactatactgaccatcagttgtaaatataggcattacgtcaatcttaccttcattgatagcttggtattttaatccaatatctaaatcaactgtatctttaaagttcagtccatatgtattacacaatggagtatatccatcctctctctcataaaagtcatattcagctccaaatgtcaatttagaagatacattttttaagtctgatatattttttaaattatatttatctgcaacttcttttctaactgctaatgcatagctattagaaaaaccatacataccagtccattgcattttaagtttagttttgtattccgactgtagtttactaaacatactttcagtatataattcatttttcttaagtaccatattccagcctgtacctgtatactctggataaatgtcaaattctccattctccatagctggctggatattagatgttccccctcctatgccttgtgtaatttccacgtttagacctgtgtttttttcaattaaaatatccaacatctcaccaagaatatattgttcagtcataggtttagtagcaatatgaatagtttgagtctttgaaggattaaataaataagacgtaaagatagttgctataagaataaggcttcctagaatggcaaaaacttttttcctatttttcttttttctttttcgttgaaaaaatttttctaccagccctaaaataaaatcaaatattaaagctaatagagcaataagtatacttccactaattgtcattgctgtgttatttgtcgtgattcctctatatatggctacacctaggcctccagcacctataaatgaagcgataccagctaatgcaattgtcataatcaccatatttctaataccagacataataacaggtagggctaatggaagttttattttatacaatatctgaaaatctgtactgcccattcccctagctgcttcaagaatatttttatccacattagtaattccagtatatgtatttctaaccattggcaataatgcataaatggtaagtgcaataacagcagtagtatttccaattccggaaaatggtatcagaaatcctagcatagaaatagatggaatggtgtatagaaaattgatagttcccaatataggtttagaagaattatgaaattcacttacaataataccaattataccacccaaaacaatcgcaattattatagaaataatagaaatcatcaaatgttctatggatagctttataaaaaaatcacttctttcagataataaggttagaatatcatttatcatccatctctctccttttataagttttacttaacaagatttaaattttaatgtagttaatctttattgtttatacatcagcaaatcgtcatcaaattatttcacaaattatatattaagattataatctgaacctcccatgactgaagtcacaagtgtgtatagccattttttaatcaaacttgcaagtagacacaaaaaagtaactattagagactccatcttcgatactctccataaaaataagaaaaaaggtcagaatcgttaaaatactaaaatttaaacaaatttctgacactttatttaattaaatttgaatatttctcacattatttattactgttaagtttaattatcattttatatacccattatatttattaaaatatcattataattttattatattttatttattatactatatattttgctgttaatgatattttattgttacataattgttttgggataccttcaaatattactctcccgccttttgtccctccttcaggtcccagctcaataatccaatcagctcttttaattacatctatattgtgttcaattattatgaccgtatttccattatctacaatctcttcaattatacttataaaattctcaatatcagccatatgaagacctgttgttggttcatctaatatatacactgaactttccttatttaattcactagcaagctttaatctttgacactctcctccagacaaagtatcaagagtttgtcctaaagtaaggtatccaatacccattttttcaatacattgtaatttcgttttaatctgttttaaattaaaaaactcaattgcgtctaaaacagacatttcaagaacttcaattatattcttcctttgaaacctatattctaaaacttcttttttaaattttttaccttcacaaacattgcaggtactctttatactctccataaaagcaagattcatttctactattccagaacccttacagttatcacaagctccttctgaatttgaactgaataaagaagcatttacgccatttgtttttgaaaatatgcttcttatgttgttcataattccactatatgttgccaaactcgaccttgaatttgctgaaacagggctttggtctataagtacagcactaggattttgctttaaaaattcatccttaatcaacgtacttttacctgctcctgctactccagtaactagagtcaatacacctttaggtatcttaatagatacattttttaaattgtttttattacaatttttaatttctaaatatccactatgttctcttacactttctttaataggaagaaatttacttaaagcattccctgtcaaagtaccacttgtaagtagatttttataactgccttcatacacaacttttccaccatacttacctgcctttggtcctacatctacaacatggtctgcaatcttaataacatctgggtcatgttcaacaactataattgtattccctttatcacgcaatttttttaaaagattatttaatttatacacatcttttggatgaagtcctacacttggttcatcaaaaatatacattaaatcaacaagattactatttaaatacttaaccatctttatacgctgagattcccctcctgatagagaagatgtctctctatccagtgttaaatatccaagacctatatctatgatactgtttaacttttctattattcctttaattaaaggttgtgcttctggctcatttatacttttaataacttcagccaattcatcaatttgcatactagttaaatctgctatattataaccattaattaaagacctatatactccttcattaagtcttcttccatcacatataggacatctatcttctataagaagtttactcaattttttcttagtagcctcagatatttctccatctctacttaagtatagacgattaaatttaaccattaatccctcatatgtcatgttagtttgaccagcattttctatcttaatcttttctgctttaccatgcaaaaacttttccaattctacttctgaataatcacatatcctcttattaatatcaaaaaatcctgattcagcgaatatattccaatgccaagaacccactccaaaccctgaaagcaatatagcaccttcatttaatgatttattcatatcaagaatttggttcatattaggaactagcttttttccaagcccatgacagtgtgggcacataccatcaatatcattaaaagaaaacatattagcattacctatatactcactaccaaaccttgaatataaagctcttaaaaaggaatttacatctgtaatagtacctagggttgaccttgaatttccaccaagtctactttggtctatgataattggtgttgacagattttctatacaatcagctttaacctctccatacttaggtaaaaaacttcttacaaatgtactaaacctttcatttagttggcgttgtgattcttttgcaattgtctcaaatacaatagatgactttccagaacccgacacccctgtgaatatggttatttttctttttggtatttttaaggaaatattgttcaaattattctctttgcaaccttttaaaattataaattcattgctcatattttacctcctgcattatttttctttaaattatttagagaaaatcgtaataatagttgttagttatacataagtgaaatactattttattagattactcctttttttataaacacaggtcaaattatagcatgtagattttatctggtagtatagtgtagggtttgatttttataaaaaatacagttattttatttaagcgtaattgcatctattctacctaaatatcatcattatatatgagtgttaaattatataaaattcttaagttaataacctcaaaatggtattagttacataaaaaaagtatcttgcctatgattttaaaaccataaataagatactatgttttacactgtttcttctttcacaaataattctatacaattattcaacttaactttaaaattttaaacattaaaaacctctatctttaaatctttaaataaaactaaatttccaataccttcaaaactatagaaaattccaatcaacttatcaaacataacttactacttataagaaattaatcttcacttaatacagacgtaagttcagggtcatttagaagatgttcaaaataactatgtgccgaaatatatcctataccatacattttacgctttgaatttacaaccttatattcataacaagcactcttaaccttattgtagtcatcaaaatccattgctttatagatagctctttcatttcttggtatatactttacatattttggcttaacaaaatacaagtcatcttttatcttaccttcacgtttaagtttctttaaaacttccccattctttctatgcattatatggtcatcatacttatagtgatgggctatatgggtcacattgcctttaaacttatgttcaaaatccaatatagtcttttccattaattcataatgtgtgccttcctttttatctatatctgcaagtataatcacattttgaggtttcactccaagctctctcaaagctgatttaaactcattatttctaagctcttccttttgcttcctagttaagtttctaaattttgtgttagctttgaaaacgttaactccagaaccatctgatactaataccacatatacattatcaacaccacactgttttatagcatctacaatggcacttcctccccataaaacctcatcatcttgatgttgaggataaaacactgctgctgatttaaattttctactattactctcaggaataggtatttcaagttttccgttaaaattctttgcaattaaaaatatcatcaataatattaatatacttattcctatgtacttcgttttactttccatatttaaaattttctccttcttctgaacctcccatgattaaagtcacagggttactacttcatagaatttcgtataatcaactcaaatatcttataaacctttgtgtcaatcaggtctaaatatacaaattattttacaatattttattgtttcatacaatctttgacacgaactataataaaataaaaaagccttctaactgcaacattgcaaatattacagccagaaagcttcttaattcttaaaatttattaagcttaaaaatttattaaatttattttttaatataaatatgtctattattaataaattatactttaattactatatcaatacgactttactatatcactataacattacttatatcaatacaactatttttatagcctacatttcctttaaaatttcaagcaactcttcttcactatacatatacttcttattacagaactggcaaccaacttctgcttttttatcttcttctattatctgagccaatgattttttaccaattgcaaccaaagcagtttttactctttcttttgaacattcacacataaaccctacttcacaggtatcaagtattttaggttccaaaccatccaaaacaatatttaatatatcatctggtgattttccttcttttaacatgttagttatagaaggtaatttagctacattttcctctaacttagcaatagtctcttcttctgcatctggcattaattgaactataaatcctccagcaaactctacttcatcttcttttgtaagaacacctaaagctactactgatggagtctgctctgatacagcaaaataataagtaaagtcttctgcaatttctccacttaccaatggataagtcccattatatggttctctaagacctaagtcttttataacttttacaacaccttctgtacctactgctgctgctacatttaactttccatttggatagtcttcaacctctacttgtggatttcctacatatccttttaccattcccttagaatctgatgtggcgataatagttccaattggacctccaccttttattattacagtcaatttatcactatcatttttcatcattaatcccattatagatgtggctgttaatgttcttccaagtgctgctgttgctacttttgtagtttcatgtaatcttctagcttcttctactgtatttctagtagttgcgacaaatgctctaacttgaccatttcctgatgtcgctcttagtacataatctctcattaatattcctccatgtcccgttaattgtcttatttttattatattactaccttaattttaatctataagtacttatctatattaaccttgggcaaaacccattttattttaattttactaagcaatagttattatattttaatttttatctatagaactttataattattagaaaataaaagtcataaagtatcatcactttacttttaatctataaaactgcattttctatatttttatatcatggttatttttaataattatcttatatagtcaaaaatatcttattttttacatacaaagaagattctttgactttcttcactgggtttgtcaaatgtaaaatccccataatattttatatccttaaatccagatttttcaagcatatcaactatctcatcttcagtatatgctctttgttggtgtatctcttcaaatctttcaaactttccacattcatctttaataaagaatgtaagttccatttcaattagattctcttcttcatcaaagtaattttgccacatatacgctatatcttctctattttctccatacatgttatttcccaatatgttggctaatttataaaaagaacttatatcaaatatgaatattccatctttctttaataattcatatgtctttgaaaatacattttccaaatcatcatcataagttatataattaaatccatcacaagcacaaagcacacagtccaaatcagatatttcaaaatcaagctctgatatatcttgttgaagtaaaactaattctactccttctttttctgccttttctcttgctacactaagcatctcatcagatatatctataccagctatatcgtaattttttttagtcaatggaattgtaagattacccgtgccacatgccaattccaatatattttttacttttacaccttcactatctattatatcttctatatatttaacccaaccattataatcaacttcattcataagttcatcatatacaaacgcaaaatcactatattgactcatcctttttattctgctcctccacaatctttttaagcctctttttgcgtgatgtaagcatacctccaattcttcctgcttccttagctgtaagtcctgcccatccacgttcaccaactttatccataagacctagttctgaggctatctcatatttcattatatcatcatttgtcaatattttagtattcttgccattagttatcttcttttctctttgtactttttctttcaaaaaaatcaccccttcttatttgtatttttgtcaattaaaataaatttatacaaatatataaggggtatttattaatacattttttttaaatttaggtatttatgctttttaatctttataatttatcttcctaatctattgcttctttgtattttaataattttgaataaacattcaatgcatttacacatatcttttcatcaaaattaaagtttatattatgaagaccatttacaaatcctttttcttcgtttcttgaacccaacataaaaaataatcctggaacttctttttgataataagaaaaatcttctgatatcataagtggctctaactctacaacagtatcacttccaatagcctctacaaactcttgatacaaatccttgtcatttttaacagcaatataatcatctataatatttatattaaccttacagttataagccaattcaaaccctctagcaagttctctaactctaagcttcattttctcatacacttctgggctgaaacatctcatagtaccttccatctttatattttcagctattatatttcttctagctcccccttcaattctaccaatagtcaacactgcattgtctattgggcttatatttctagacactatagtttgaagtgagcttacaaagtttgaagctatcactataccatcaataccattttgtggcatagccccatgtccacttttagacactatttctatgtcgatatctcctatttgagccataaaatagccttctcttgtacctacataaccttctggtaactctggatatatatgaagcccatatatttcatcaatattgtattttctaagcactccttcatctattaaagcttttgctcccccaggaccttcttctgctggttggaatataaatactatattatcatttaagtcttctttattatcatttaaatactcaattaatccaagtaatatagtagcatgtccatcatgaccacataaatgttttaccccttcttcactatgaagaccatctatgtcagctctaaaagcaatatcttttttaggtcttttaccttctattacacctactatacctgtttctaaataaacttcatactcaattcctaatttatcaagataatctcttatatattttgaagtcttatactcttttctcccaatctctgcaataggatttaatgacttcctatgtttataaagttgttcttgtaaatatgatgcctctctcatgtaatctcctccaatttctaatttattaaaaaatatttctatatttctttataattaaaatattatatagcatgttatactaattaaaaataaaaagctaaattgaatataaaaatattttgcattattaaataattcaccattaataataattcccctgtttcataaatcaaaacagaggaattattattggaaaattttatttttagcaagagaagaaatgtttagcaagtccacccttagctgtttctttgtacttatccatcatatctataccagtttctttcattgtttcaacaacttggtctaaggagacagaatgtgagccatcagttaataatgcataattagctgcatcataagctctttgagctgccattgcatttctttctatacatggaatttgaacatatccatatacagggtcacaagtcattcctaaatgatgttcaagtgctatttctgccgcatattcaatatggtctatagttccaccttttaagtatgctactgctgctgctgccatagaacaagctgctccaacttcaccttgacaccctacctctgctccagatattgaagcattagtttttattatattacctattattccagctacaagtagtgcttcaattattttttcgtcatcataattatagaaatcctgcattgcaaagaatattcctggtattactccagcagaaccacaagttggtgctgtaactattatattaccagaagcgttttgctctgaagctgctagtgcatatgcatatacaagtgttgagaagctcttatcttttttatatgcattataaaatgtacttgctcttctttttaataataacttgcctggtattatttcatctgtacttagtccatcatcaatagattttctcatagcatcttttatagtttttatataatcttttatgtcttttggttcacattccaacacaaaatctaccaaagtcttattattttctttgcaccattttactatctcatccatagtatctaagtgatatatactattgcttttactgtttctttgaccttcttctgctatagtccctccacctacagaatatacagtccattcagctgttacatttttatctttatctaaagcttcaaacttcatcccatttgggtgaaaatcttttataatatcttcttcccaaacaatttcgacttttttaggtgctatagttttttcaattatatagtcagttaagtgacctttccctgtagctgccaaactaccatataatattgctctaaaactttctgcatctgggttttcattcttaaatctctctgctgctctttgtggtcccatagtatgagaacttgaaggtccacttcctattttaaaaagttcctttaaagtatccatattattcctcctaaatttacggtattattgcttattgttagattttacgcacatatttattataacctaaatatattaattattagttattaaattctcataaaatttattttttatttccattttggtatattttattaaattaatatgcatattttgagaataaaacatttatttaaaatttttctaatattaatataatataaatatcttatttaaacagttaagatattaactatacctattaaaattaattaatttgtactataattattattgtacttaaaaaattaaatttagataaaaaaggagatttgattatatgttatttaaaggttctgctgttgctttagttaccccatttacagaggataataatgtcaactttgaaaaattaggtgaattaatcgaatatcacattgagaatggcacagatgcactagttgtttgtggaacaacaggtgaggcgactactatgagtgaatctgaaatttttgctgtaataaaatatacagttgaaaaagttaataagagaatacctgttatagcaggtactggttcaaacaatactatgttgtctgttcatatgagtcaagaagctgaaaaattaggggtggatggtcttttaataataactccttactataataagactaatgagaaaggtcttaaacttcactttgaaacaatagcaaatagcgttaagttgccaattattttatacaacgtaccaggaagaactaaagtgaatataaagccatctgttgtggccgaacttgctaaaatagataatatagttgctgtgaaggaagcaagtggagacttagctcaagttgcagaaatagctaaattagtacctaaagactttgctatatactccggtaatgatgatactatactaccactattatcattaggtggaagtggtgttatctctgtacttgctaacatatgtcctaaagaaacacatgatttagtaactaaattctttgaaggtgatattgaaggctcaaaaaaattacaacttgatatggatgctttaattgctgctttatttatagaagtaaatccagttcctgttaaaactgccatgaacattttaggttttaatgttggtgatttaagacttcctctagctgaaatggaagaaactaatcttaatgtgttaaaacaagaattgacaaattttggatttaagttttagcaatatttatataaataagttgattttttcttaaatatgtattattattagaataatcaaattttaatatcctattaacctagggtagaggtagctgtaactaagagtatccaatagtagctggcaggtgttaatgattggaaaaaggatttacagccgaagaaaatatttcttgcaataatattttctgggattgcacataacatgtgtaatactgtcacttatttttgtaggtgatgagctacagggtttactttgagtgataaattagacgtacaaagtatacctttgtacgttttttgtatataattaaagttgttaatataatattaaagtttttggatatataaaaatattaacatatcttacttgtataactaaaataaaataatgttttaataatttaaaattggggtgaatttatatgaaaaaagtaaatgtagcaatagttggtgctactggaatggtaggtagaacatttttaaaagtattagaagaaagaaattttccaatagaaaatctatttttattctcttcttctaaatcagctggttctaaagtaatgttttgtggtaaagaatatatagtagaagaattaaaggaaacttcatttactgatagaggcatacaaatagcattattctctgctggtggaagtattagtgaaaagtatgctccaatagctgcttcaaatggaatcttagtagtagataactctagtcaatggagaatgaatccagatgtgcctttagtagttcctgaggttaatccagaagccataaaaaatcataagggtataatagctaatcctaactgctctactatacaagctatggttccccttaaagctcttgatgataaatacaaaattaagagagttgtttactctacttaccaagctgtatctggttctggtgttaaaggtgttgaagatttagagaaaggaatgaacggtaatcctactggattctaccctcatcaaatctcttacaactgtcttcctcatatagattcattcactgaaaatggatacactaaagaagaaatgaaaatggtaaatgaaactatgaaaatacttgataactatgatttaaaaataactgcaactactgtaagagttccagtaaaaaatggtcatagtgaatctataaatgttgagtttaacaatccatttgagttagatgatttagtaaaaacacttgaagaagctccaggtgttgtagtagttgataatcctgctaaaaacgaatatccaactgctgtagaatttgatgatagagatgaagtatttgttggaagaataagaagagattttagtgttgataatggtgtaaatctttgggttgttgctgacaatataagaaaaggtgctgcaactaacgcaattcaaatagctgaaatggctttatcatacgatttagtataatatacaaacttgtataaatatataattttgtaaaatattaatagtaactcaaaaacaagcattagaagtaactgtaatataaaacacaaaaataaaaaagaggggattgattttatatgatatttaaaggttctgctgttgctctagttacaccatttacaaaggataacaaagttgattttgacaaattaggtgaattagttgaataccaaatagctaatggtactgatgctatagtatcttgtggtactactggtgaagctaatactatgactgatgaagaacaacttgctactattaagtatgttgttgaaaaagttaataaaagagttcctgttatagctggaagtggttctaatgatactatgcactcagttaacttaagtcaagaagctgaaaaattaggagtagatgctctattaataataacaccttattacaataaagctaataaagctggacttaagcgtcattttgaaacaatagctaacagtgttaaacttccaattatactttacaatgtccctggaagaacttgtgtaaatataagtcctagccttatagttgaacttgctaaaattgataacatagttgctgtaaaagaagctagtggagacctaggacaagttgcagaaatagctagtttagttccagatgactttgctatctactctggtaatgatgatactatacttcctttattatctttaggaggtcaaggagttatatcagtacttgctaatgtttgccctcaagaaactcacgatttggtagctaaattctttgaaggcgatattgaaggttctagaaaattacaacttggtatggatgctctaatcgcagctttatttatagaagtaaatcctataccagttaagactgcaatgaatttattgggattcaatgttggagatttaagattacctctagcagaaatggacccagcaaatttagaagtgttaaagaaagaattagttaactttggactaaaagttaatgcatagtaaagattaatgcatggtaaaaagtaagtttggtcaaaagttagcccttaatcataggaggaaattatgttaaaagttatagcaactggttatgatggaaaaatgggtaagattttagccgatactataagagaagataatgaattagaattggtttgtgttgcagctagaggtctggatagctatgaaggcgaccttaaaatttatgaagatatgagtactatagttgaggaagctgatgtagttatagatttttctcatcactctaatttagataatatcttatcttacgttttaaagactaaaacacctttagtaattgctactactggatataatgataacgaaatgaacaaaatacgtgaagcggctaaagttattcctgtattccaatcatataatatgtctcttggtgtaaatgtattagtaaaattggttaaagatgcagctaaattactagaaggatttgatatagaaataatagaaaaacatcacaacagaaaagtagatgccccaagtggcacagctgttatgattgctaacgctataaaagaggttttgccaaacgttgaaaataattatggtagatatggtcgtagtgcaaaaagacaaccaaatgaagttggtattcatgctataagaggtggaaatattgttggcgaacatgatgctctatttgctggagacaatgaggttcttacaataagccatcaagctcaatctcgtggtatctttgcaagtggttctatagctgctgccaaatacttagttaagcaaaaaccaggattttataatatggacagcatgttgggataatagtataaatataataatacacaatataaattaaacatatgcaatatagatataataatacgcaatacaaatcaaacatatataataaatttatttaatactatgtctatacaataaaaactaactaaaataaaatataaataataagaagtaagtatatactaaaattgacaaataagtatataataaaagaaatataatgaaatacaaggagaattaacaaatggtaaatttaaacgatgcttatgaaatagcaaggtatataaaagaagttaaaaagaaaacacctgttaaggtatatgtaaatactaactctttacacttccaatcaactgataaatttaaggtatttggaagtaatggttcttatatatttgtaggtgactatgaggatataatggaagtattagataaacatgggaatgatataacagatactcatgtagaatatgatagaagaaattctgctattcctctaaaaaatactttaaatgaacatgcaagaattgagccaggtgcaataataagagacatggttactatagaaaaaaatgctgttgtaatgatgggagctgttataaatataggagctgttattggtgaaggttctatggtagatatgaatgctgttattggagctagaggaactcttggtaaaaatgttcacttaggtgctggtgctgttgttgctggtgttttagagccaccttctgctactcctgttatagttgaagatgatgttttaataggagctaatgcagttattcttgaaggtgttagaatcggtaaaggtgctgttgttgcagctggtgctgttgtaactactgatgtagaagctggtgccgttgttgctggttctcctgctaaagttataaaaatgaaagatgaaaaaacggctgacaaaactaagcttatggaagaccttagaaatttagactaattaaatagtactatattattaattagaaagattaattaaacaataatatactaatttaaaaaattaattaaaaaggtgtctctgtatgaatttaattcatcagaggcaccctcttttttataatatttttatcttttatttataatcattttatttttttacaattctcttattcattcttatatcatttttatttcttgatgacaagtatttttatttccttcaatttttcaatatatcaatgtaataaactattaaactttttataatttaataaatagaactgctgtttactactggttgtgcatctttattgccacaaagcacaactaacagattacttaccatagctgctttacgttcttcgtccaaagtcacaacattattttcacttaaattagtcaatgccatctctaccatacttacagccccctcaacaatctttttacgtgctgctattatagcctctgcttgttgacgttgtaacattgctgctgcaatctctggtgcataagaaagatgagtaattctcacttcacacacttcaattcctgcaatgtcaacccttgattgtaattcatcttttaatctatctgctatttcctgactactaccacgaagagatttttcatctccatcttcagatacatcatatggataaagtcttgaaacattacgaatagtagaatcacactgaatagataagaatgtattataattatccacattaaatactgcctttgttgcatttataaccttccaaattacaaccactcctattataattggatttcccaataaatcattgactttctgcttttcattattaagagtcattgtttttaaagatacttttttgccccttgaattagttgatatatctaccttttcatcagatgaagatttcgatacattaattcttgatactgctgggtttattgctgaacaaaatggattcacccaatagtacccttctttttttatagttccataatagttaccaaacaaaactagaactatagcttctttaggattaatcatttttagcccaaaaaataggataaaatctactactataaatacaagtcccaaaattaacataagtgaacctattccagtaaatccactatcaagttttactatcccaaaaaccatgatacctattgaaactactaaaaataatacaatcattatcaaagctgccactccattgaatacttttgcgtctttctcttgataagttttttcttcttttaacatatctatcactcccatctcagtatattaagttaagatatttctaatttaataataacacttttaacaattaaattgttgaatttaaaattaatactatatgtttatatattttttatacatctttatgcatacatgtatttagttattttaatgtattaatattgatttccaaataaatcatatgatatatgaatatggtatctcaaaattaactttttagttcatggggcactctttttgatatgaagtcaaatatatttttatcatttatacaatgaaaaagaagtttatctatattttgaaaaatccacttaaatttttttaatgtaagataaattgtaagcttattatcactaatattattttatataaataatattagtgataaaataaacttatagaaatataacaaatttttattaatttcataggaggaatttatattgaaagttataattaatggctataatggaacaatgggaagagttttagcagaatgtgtaaaaaaagataatgaattagagttggtttgtggtgtagctaggtctgctgatgaaaaaggtcatcatagtgatacaaagctttacaaaacaatgactgatgtaactgaaaaaactgatgtcataatagacttttcacatcatgagactttagagccaatattgtcatatgctctaaaaaataatacacctgtagtattagctactactggatatgatgaaaatgacttaaataaaatagaagaagcatcaaaaaacattcctatattattatcatcaaatacatctcttggagtgaatatattaataaaattagttaaggatgcttcaaagatgttagaaggttttgatattgaaatcatagaaaaacatcacaatagaaaagaagacgcccctagtggaactgctactatgatagctaatgcaattagagaagtcttgcctgaaagtgaaaatacacatggtagatatggtagagattgtaaaagaaaaccaaatgaaattggaatacactctataagaggtggcaatataatcagcgaccatgatgtcatatttgcaggtgataatgaagttcttacattaagccatcattctcaatctgatgaagtatttgcaaacggttctatagttgcagctaaatttttaattggtaagcaatctggactttataaaatgtcagatatactaggataagttttgtacataataaatctcaatctatttaggtattcatattcatcaatttgaatatctaattgattgagatttctattctaaaagtttataaattttatgcttaccttttaaatataatcatttttcttaaagattatcttatttattggtatatggaattatattgtttattattttatagtcctttcatcatataaacctattaaatattatcctatttattggtatatgaaatcatattgtttattattttatagtcttttcatcatataaacctattaaatattatcctatttattggtatatgaaatcatattgtttattattttatagtcttttcatcatataaacctattaaatattatcctatttattggtatatgaaatcatattgtttattattttatagtcttttcatcatataaacctattaaatattatcctatttattggtatatgaaatcatattgtttattattttatagtcttttcatcatataaacctattaaatattatcctatttattggtatatgaaatcatattgtttattattttataatcttttcatcatataaactattgtattctataaactgatacatacccagctggagaagtacctgtcgtgcctgaaccaaatgtaaagcttaaagtaacagctgctgctctagcatcaactaaaaagcttaaacttacacttacatctgatgaagtaagcgtatttactgcttttgcaataaagttattttgggctactccattaaagttagtagtaattgacataaatcctgcaagtgaaagtatggcacgtataccgaaagatacattgtatatccctccaactgcaagatttatagtactacttgttggaaaagttatattagttccatttataaatgatgaattaaatgtcactaatgtattattccctaaacttgaagaagatactgtaaattgtgcattgtttgctgctaacactcctgttgctccggtcgctcctgttggacctgttgctccatttgctcccgttgctccggtcgcccctgttgctccggtcgttccatttgctcctgttggtcctgttggacctattggacctgctactccatttgctcccgttgctcctactgctcctgttgggcctgttgctccatttgcccctgttgctccggtcgctcctgttgctcctgctactccatttgctccggttggacctgttggacctattggacctgctactccattcgctccagttgctcctactgctcccgttgggcctgttgctccatttgcccctgttgctccggttgctccggttggacctactgctccatctgctcccgttgggcctgtcgctcctactgctccggttggacctattgccccagctactcctgttgctccggtcgctcctgttggacctaccaaaccatttgctccggttgctccggttgggcctgttggacctaccaaaccatttgctccggttgctccggttgggcctgttgggcctgttggacctaccaaaccatctggacctgttgctcctactgctccggttggacctgttgctcctattggacctgtggcacctgttactccatttgctcccgttgctcctatacttccggttggacctgttgctcctgtatttcctgttgggcctgtagcacctgttactccatttgctcccgttgctcctgttgctcctgttggacctgttatcccattcgctcccgttgccccagttgctccggttagtccggttgcaccatttgctcccgttgctcctgtatttcctgttggacctgttattccatttgctcccgttgctcctgttgctcctgttggacctgttatcccattcgctcccgttgctcccttgtttccggttggacctgttattccatttgctcccgttgctcctgttgctcctgttggacctgttattccatttgctccagtcgctcctgtatttcctgttggtcctgtagaacctgttgttccatttgctccagtcgctcccatatttcctgttggtcctgttattccattcgccccggttgctcccgtatttcctgttggtcctgttattccatttgctccggtcgctccggttgcgcctctaggccccgtcggtcctgttggaccagtagcacctgttggccctgttggacctacatcttgatataaacttggacctgaaatatcactcatataattaatcctccttttttaaagttagagtattactctataaatattgagtattactctatataattatatgaatcgacaatttcttatgtgataatgtatctatttgcttatatcaacatatatgctttgattcttaaatttcattacttttttgtaaaatcttttacaattattagtactcttttacaattattaatacaattaaaaaactcatttcccatcaattatttaaaatttttttattatgttataaaaaatagataattaaattgcataaaattaatttaatactactttaattactttttaaataaaaaaacctcaacacgattaataaaaatcatattaaggcatccacaaaattatataattgcttatctatcttcatcagtaacattgaatatataaggaacatttctataataatcaccaaaatcaaacccatatccaaccacaaacttatcttctatttcaaatccacaataatctggcactaaatcaacttttcttctgcttggtttatccaaaagaacacagcattttaaactagcaggatttttagcttttagatgttttaacacaaaatccatagtaagtgcagaatcagtaatatcgtctacaaccaaaacatcatatcctgctatatcagtagtcacatctgaaaccactttaacctttccagtactttcttcattgtttccataactagatgtagtcataaaattaactctaagtggtaaatttatatttctaactaagtctgcacaaaatataaagctaccttttaatagagaaactaccataagatttttatctttataatctttttctataattgctcctaattcccttaatttatctttaattttttcttctgaatacaatacttcccatttttttgtttctatatccataaaaagacctccaattgtaataatccttcttaattttataagagattgctcactttttcaatactcttattcaatattagtcaatattattgagtttttatgttcattcaacaattattaacaatgtatcttatattttaagtagttcatatatccacactaaattacatactatatattttagacaaaaaaagaaaaaacttgcactaacaagttttttctattatacataaatttatacataatcatattttattagagggtactaattaaatttatttatgctatttttgttatacctcataatacaaaacatattataaagtactagtcaactttattcatatcattcattacatttaagattatctcatctgttatagacatacctttgtcacttactctacctaagttttgtatactttgctcaacacttgaaccaactataccatttagtggtggtacaaaacaatcttgcttagctattatagcactttgtatagctgcagatgctgcagaagataattttaatgcacaaccagctttcgcaccgtcacatatcattccacttaagtcagctatcatattttctatagctccttctatttgcttttcagtaccattcataagccaagagataccagcagttgctccagtagaagcagcaacaccacatccacacacagcagataatcttcctgtatagttcttaatataaccagttactagatgagatatagctaaagcctttgctagtttttcatcagattgtgggaattttttattataagcaacgattggaagaattgctgttaatccatgatttccacttccatttgaactcataacaggcatttttacgcctgccattcttgcatctgaagctccagcagttaacatcattgcataatttataacatcattacctaaaagaccttcttctatagactttttaattccatatccgacaccaataccagttttttgttttaatccatattcagccatctcttcattcatttttactccatctagtaaaaattctatatctttaaaatcaatttcttctacattttttattaattcttgtatagttactgtatccattaaactttcagctttttctgccgcatcatttgaagctgatacttttggttcattgtctaataatacttctccatctttttctaagaacgtaaaattatcatgtttagttcttattctcactttagcaatatgattttttccttttaacacaacttctataaatactttctctcttgtatcagcaggtgttattgatagtggagtattatccatataatcctcagctattttaacttcttcttttgttagagtttctaacacacttaatccattttcagaatggccacctactatacctagagctgctgcaatttttaatcctaatctttcagtacctggtatacctacgcacatgccatttttgtagatactaggactaactaacatacgattttcaactatttcttctcctaataattcctttgcctttgcacatgctagagctaaggctactggttcagtacaccctactgctggtttaacttctgcctttaacatttccactaattcttttcttatatctctcattatatataaacctcccaattaagtttagatttagtactcaaataattaattaaataatttcttatctatatttatagcaaaatacatgccatattttttatatctttttatatttttagtcttatattctataaccattggtatgactgcttctatttatgtattttttttatttacatagagtatttatattctttaaaatggagaaacatatgacaatttcgcaaaaagacaaaaaaaagtctcagaatgagattctatatcattttgagacggctcaaatgtgttattttttaacttataaaaaccattttttaattcataaaaaaagattatgcaaaacacttatagtataagtttaaagctttctttaaagttatgaatttagaaaaatttaaattttatatagctttttattatattactatgaaattatattgtatttttcaatttttctatataatgtagctcttgatattccaagtgctttagctgttaattctttatcttttttataatctttgtacttatttaaagcttttattatctcaatcttctctagttcatcaagtggaattatcctatcgcttttaacttctaactcttctacagaggtattcttaattttttgaggaattacattcattgtgattattgaagaagaagacatattcacactatattcaataatattctgcaactctcttatattccctggccacttatattccatcatagcatcaacaaccctgctatctatgtcaataacatttttatctaatttttttgaatactctttaaccatatgcttgattataagtgggatatcttcttttctctctcttaaacttggtaattttataggtataacatttaatctataatataaatcttctctaaaagtgccattttgaaccattttttctaaatctttatttgtagcagcaataattcttacatctattgagacatttgatttacttccaattttattaagttccttttcttgtaatactctcaataactttgactgtaaatgcaaactcatatctcctatttcatctaaaaatatacttcccttatgagctacttcaaacattccaagctttccaccttttttagctccagtaaaagctccctcttcatatccaaataattcactctctaataaattgtctggtatagcagcacagtttacagctataaaaggattatctactctattgctatggttgtgtatggctcttgcaaatagctccttacccgttccactttccccagtaataagtactgttgatgttgatttagaagctattagggcttcctttttagaatttcttatagctacactttctccaattatgttttccaattttattctataatctttattcatcttattgtagttttttatagcatctcttttatctataaaatcaataacatatccctttaactcattttttaatactattttattgatgttgtatattcccttcgaatcatatccgtatcttttataaaaaaaactacacgatttgtctttcttaaagttatttatagaaggtttctttataaaatctaattcgacaaatatgtttttgccagttatactatcctttatattgaaaagctctttaaattttgaattatatttatcaatttttccatccacatcaatagacacaacagctttgtccatattgtttaatagtgtctctaattttttcttttctaattcaagctcataagttttaatttgtgcttttaatttattagatattaagtctgccattttgcctaaaaagtttataagaccacttttattattttctataatttgtgcttgttcttttgtaaaggctataaggcctataacgccatgagaatcgccatcacatataataggacaacacacctctgcaaactctacacaagccccacttttatagcattccctacatacatcactactctttgggtcatcaattagtattgtgatctgttctgtaagtgattttttaaaagccgtatatttatctactttctcacctattttgtctatatatactcctgtacctgcaatcctaaataactccttatttactatagttacatctatattgagtactgatactatagcttcagctatattttgaatatcagattttatatattctaaacctatcataaccatcattccttatttttctttaacataagtatttgtcttatttctttaagaatcaagtatatcttatttaaagtaaattggattgacatcaggattacaaagagcataacaattattattaactcataatttatttccatctaaacatctccttataacaaaagactaggcttaacctagtcttttatattatatccatatttatattttaactcatttatcttctttttcccacataaatatattttaatttatttgactctttaatcataccatcaaagtttaatcttgaaaatatattaaatacttcatgtggatagtgaatctttgcaacagaaccacaaaatttatgtttaagataatttaacttaacttttaaattctttaaatttaaatcctctaatataacctctccattgccctttaacactctttgtatttcagatgaagctttttcacaatctgtaataacattaaattggtcaactattattatcttgttgaactgattatcatcaaatggtagaaactctaacttacctttaactacattgcaattttcattatacactagagaataacagacatcttcataattactattctccagtatagttacagaagttccaagacctctcaatctcttgcctaggtttcctatatgaccaacaagcaatattttatcacctacattatactcaattgtatccaaaaaacattctaattcatcagatgtatatttagctttaactggctgtttatttatctgacataatatgcttttcacaatgcttcacctcttcatttcctcaattataaattatgtacagattacattataataaatggcgagcaactattcaagagatatttcattagtatttttttaaacaatctttatacattttaatatgatattataccaaatttattaggattttattcataaaaatcagtctattttttatgtttattcattgttattttcatccaatttttttattttcgatatggatacttcatatgccatttttttgaccacattattttcatctatttttttctcatattctctactttgaaccctaccccaaagctgtattctatcaccaacctttagattctttgcaaatttagcatttctaccccaaactattgatggtatataatcagatttattataaggtctgtttatagcaactaataaatcggttatttcccttcctaaaggtgtcttcctatacacaggttccttacatacatatccatctaaaaatatactattagggtctttattttcctcgtctatgctttttatttctctgacaaacactgtaagcactaatctatttttattatttaatgttttgttatatgatcttaattggcctacgacattgactaaattttgtttatcaaggtcaatatcttggagaagtctttctgatacagtcattggaagtatatcaaaagaatcgcttagtctgtttatttttattttcatattataaaatttttctccaaatatctcatggctaaattctagcttattgtctaactcccctcttaagtttactacgttattctcatctttaacagctatcatattttatccctccacaattgttaattcttatatttctggtatcagcttatataataaatatatttataagggatgtattttattacaaatctttgattgctgtttaaaagtttttatttagttataaatttcatttaatatttcacttttataattataaaattattatctttttgtactacatatactaattaaactacctatttcagttttgtattaattataaaaatcctattatataattaataagtcatatataacttaaatttattcactctatataagcaacttcaacgaattaaatttattcaaataattcagatgaatattgagtcattataaacttatttttcttaattataagttatattagacttattacagcttatatttttattaatctgtattaatatatgaacatttattgaacttattgattataaaatttaaatatttagctttaaattatgctttattctttgaaaatacaacgttttttacattaaatctactaaatcactatatatattacataattggcatgttaattgctttatattaatttagcaaataaaaaactgccctaaaatattaattcaatattttaaagcagtttataatctttattattagctgtaatatttaataaacactaagtagtctttaactaagcagtctttttgtttttatttgcagccattatcattgtagcagaagtataagctataactactattactaatgcttttaatatatccattggtagagtttttactatatatgcagctacgaaaactcctattaaaccacatatagctattataactgatgcttttttagtatatgcatcttcttttataaatttcatacttgcaactggcattaataatgcacaagaacccataactattgggaatgcaacttttgcagacattcctaagaaataaaccattgccatacctggagcatatagacctataccagctgtcattaaagctcctagtataaagttacctattacacctattaccaatttaacaccagtaagacctaattcatttcctccacctggtaatacgttaatccaaggatgacctaataacattaatattgctgttaatgctaaagttacacccataacaagttgtatttttctctcgtccatcttagctattattcctgcacctatatatgaaccaactgctgctgccacaaccatagatactaaagtaacaccatcaactggtatgattgatgtaaatatgaatgcttctgtaacaactggaatagtatgtgctacgtttaatgtaccaggcatttttttatctggtatatttaactttaaagcctttgacattgctattgttggagcaaatgaccctattcctaatgtatcaaagaagtctgttataaatcctgttacagcaacttttggagtactttgttcttctagtttcccctctttgtttgctttagctacgtctttaccaaacacaactgcaaagattgctgcgaatactacatataatgcctttaagattgctaccataatccatcctcctatttttttattttttcatatattctgaatcttatagcctaaaagctatagaatagcaaccgacaagtggctactattctattttaatttcctaatttatttattacttatttaagaataaatccatgtttaagtgggtcttcttcatctattacaaaatgattaaatccagttatataagcagaaccagttattttaggtactacagcattgaaatctgcaactttagtttcttcaactatttcacctttgaataaagttcctaatatactttcatatacgaatttttctcctacttttaattcacctttagcatgtaaagtagctaatttagcacttgttccagttccacatggagatctgtcaacttgaccttgaccaaatataactacatttttgtaagtagcttctggatgagttggctcatcatatatttcaactaagtctacagtttttatatgagctaaagttggatgttgtatttctattttctcatttattatatctctaagtttcatagctagttcagttaatttaccagcattttgaggttcgatttttaaacctaattgacttgcatgtattatagcaaagaagcttccaccaaatgatatgtcaaatttaacagtcccaacacctggtaagtcaacttcaacaccttctttatataagaaagctggtacgtttaagaatgatacttctttagcttttccatctacaactgtaacgtctcctcttattattcctgctggagcttccataactacatgagttacaggctctactgctggaactacacctgtttctatagctgctgtcatagctcctattgtaccatggccacacatgttaaggtatccaccaccatccatgaagattattccaaagtcagcatctgggcaacaaggttgagtcattacagaaccaaacatatcattatgtcctcttggctctaacattatagcagttcttaaataatctagattttcctctaaatattcttttttctcaggcatagaatttccttttatgttaggtattccacctacaactattctagttgcttcacctgctgtatgagagtctatagcttgtatacttctgctaaatttcatatcaaattcccccttaggtttattttgcgtctttacgcatttttaattttaggaaagccaatgcttttttaacatcaacttcatccatgtgattgtctccaactacttctgtttctatgtagcctgttgtctttttataatcaattatggtagctttatccaaatatggattggtaattactaatccatctgctcccataatagtaagacctactgcaggtatatctgattttacaaactctgctatagcatttgtaaaatcaatgtgctggtttcctgccatatctaaagttataatcactccatcaggtcgcaatgattcaatccatcttccaagtctagttgctaaaaatgttttccattcattgtgctctgatgtcccaactacaaccactcctaacaagtctatgtcagaatcattatctatcaaatctagtaacgggtctctaaatatatgaagtgatgtgtttttcattgatgtagaaattcccacaaaactcattcccttacttaaattttttatccatgttttctcattttaagttttaaaaatgctaaagcttttttagcatctatttcatttgtgttgttttctccaactacttctgtctcaataccttcctttgatttgttcatatcaactatggtatccatatattgattgcttacaacaaacttagcttgagtcccattaaatgtaactccaactacaggtatatctctttttcctatttcctcaaatgtgttagcgtagtcaacatgtgagtttccccaaccatctgatgaaactatagctccatctactctcatggcttccagccaagcggccgttctttgtcccacaaaggttttattttcatttccatctggagttcctactactattactccaagtaaatctacatccttatcactttcaactatgtctaaaagtgggtctctaaagtgatgaagagatgtttcttttgttgaaggtcctattcccataatatccacctctcttaagtcatagctctaagggcaccatctctgtattcattaggagatataatcataggtacatttcccatatctataattgatgttcctccttcaaatccactaggttcctttgagaataactgattgtcatacatagcaccttgacctgctatttgttttactatgacaaccttttttgcatttggtcgaattttgtcaaaatattcacgaacttgagtagcatttcttccgtcttccattttcaaagacgctcttatttcttgtataaaatcatcacatgctctgaatgctgcaagtggaagtgttctttcaaaaggtaaacctccctttaaagttacatctacatggattatataatcttcaactgatggagttccatatctcccaaataccatttggtctttcaaaattccttctgaagaaccaaattcatgcatttgatttccatcttcatctgcaccagttaacattacatatacacccgttaaagtatgtgtgataccctctcccagtctgcctaaaacttttgttgatattggtataatgtccataatagtattaatttctctatcataatctccaggttttataatgtctacttttatgtctgttattaactcttctctttcttttatttcatctatacttgataaatctattgtaagtacatctttctttatagaagtttttgaaccgaaattaacttcattcatatgaaacggttttataacaagtcttctcattattttttcttccataatatccacctttgttcttaaaacccctctcctaaccgtgtaggagaagggttctatattttcaaatataaattacattttaaacgtgagctttatattcgtatggtaatggaactatcttaccagcagatggtattgcaactaattgctctaatgtatctcttaatatatgtgtttgcatttctatattatgtggttcaccagcattagcacccattggaactaatggagcaactgctctaggagttccgttttgtctaactactggaggaagagctgctattattattgtaggtattccagcttcctctattgctctctgcacgatcacggcagttctatggcaagtacctcagccagctgtcataactacaccgtctactccctcttccttaagtttagcagcgatagcaggaccagtttcttcagtgaagacatgttggtttcctccaccacccatgaatgcatagtgcataggagctactcctttgataaatccttctgcagctaattcatgtaatctatctatagggaacatacagtttatatctttgtttacatctccattgtcatatccaccatgtgataccatcatttcatcaactgtagctgtattaggtatagctctaaatgtagtatctcctgctagattaaatctcttgtcagattttaaatgaacaccagctgctgtagctaaagctatagtcatatcttttaattctttagttacaggagtccaaactggaggaggtgttattggaacgaatatttcagattgaagtccttgtactgttgtaaggctcatatatttcctctcccttctattttcaaacgattatttattatttttcttcttgttttgattgcatttctgcttgtttttctttttctctcctaatattttctacatactcttgattaggctctggacttaatacctcaggatagcttagcatgaatccaacttcttgacctatcttaagttcgtagtcagttataagcattctattaggtattttaaattgtccaagtctaccttttaggtctatagtcactccaccacctttgatgtcaactataataccttcataaaaagtctctgatgagatatattttaacctatccattataattctacctctctatactgttttaaacttggatctaaatttatgttattgtctaaatcttagttagtatctaaattttagttttcgtctttttcgtatatttctcttctcttcttactcattggtagagattgctcattctcttctaatactattttttctcctgtaactttttctatagcttctatgttatttaatttaacatttggattccattttctttcaggagctttaacttctacaccttctatagcatttttaagcatagccattattctaacagcatcttctggagctaaagtgttgttagataatatttcattctctataccttgcttagacttattgttgtctaccatgtgagtcatgtatttattaccaacaactagagcaccttgaacagctgagaaacttacaccaactactggtatacctctcatacctatttgctctatgtgagatgcgaaatctatatggttgtttccgaaaccttcagtagttactacagctccatcaacttccatagcttcaactaacatacctaatctcttagatacatagaatttctcagcatttacttgtggagaaccaacaaatacaacacctactaaatctatttcttcgtcttccatagctcttattactaatggctctctccagtaatgtcttgacatttcttttgatgcaggtcctatacaagttaatgcatggataccaccatctaatacttcaagtggagataatacaactggcatgtttcctaagtcaacgtttggttgagctcctaatgtaccaactggctcaactggtaatattaggttatcatgcattgcaccttgtcccattatttcttttataacaacaactttctttttaccttctcttctgtattgctctattacttcttcatcaactactaaagagttgtcaactttctttaatgcttctcttatttcttgagttacatagtcaaatgcacggtgagcagctaaaggtcctggtctttccatgttagttcctgcttttattgttacttgacctttgatgaatatttcacctttgtcagcagcacctggtctaccccacattatagtagtatttaactcaccttctgaagaaccaaattcacctatttgaactccatcttcatctgtaccagttaataccattacagctccatctataactctagttatacctgaacctaattcgccttcttctttagtagcgattggttgtatatctaatacagcttcactgtaagtttcatatttatcaggagttattatttctaacttcatatctacaactaactcttgagtttcattagcttctttacatatttcttctgcgtttctgatgtataaagtagttccttctattttagtttcatcagcaaattcaactttatctattttaaagtgttttttagttaagcttcttaaaagtttcttttcttcaacttttggagctacttctgctgctgcacttgccactggagcagcaacgtttgctactggagcagcaactcctgcttgaccagctactgataaaggtatctctaagcttatgttcttaccttcacctatgtgtattttaactgtttcacctgcaactcctgtgcttactggaactactgctgcttctgatactggagctgcttcttctactgtttcttctactacttcttctttagcctctcctgctttgtatccttctacgttatctgtagtcattggagaaagtgcatctaaagtttcttttaacttagctcctagtacttgacctatagttaatccattttctggtattgttaataatccagaatcctctaagtctgcaaatattgctggatcttctaagttttctggcgctataattgttcccgcttcaaatctacaacaacaaactgctgggtcatttgcatgggcttgagctgtttctaaagttattgacatagtataaaatacctccttacattattttcttatttattattttaaatctcaattcctcaacaggtaaccccttaactgagaaattaagtaaattaaaacctacataatttgttatgattaatattatttttttctcactcaaagtcactttatattataagcaattcctatgccaacttattaacaaaaagattttttctataatagattcttcatctatcgctatttttagccaaatattatataaatatttatttaaaatatgttattttttgtatttgtaaacattttctcaaacaaaaaaagtgtcaattaatcaacactttttcattttttttaacacatctatatacacaacacttatacaagtgttggctttactaggttttaaattaaagtttatcattttgtcaaaatttagtcatatgtcatattttagacacatctattttgtattggtctatcttataatacaaagttgttctgggtatatttaatatcttagctgctttagctttatttccattagacattttaagtgccttggttatattctttatttcaattttttgagttgccttcgttaaatctaagggatactcttcttcttcagtactattatttgtagaatccatcatataacttggtacatcatctacatctattttagaattttgtgacaatacaacaatattttcaatcgtattttttaattctctaatattacctttccatctataattctgaaatatatctattacatctttgctaattgtaagaacaggcttattattttgtttacatatctcctctaaaaagctatgaaccaataatcctatgtcttcttttctctctctaagtggaggaatctttatttcaacaacatttaatctatagtataaatcttctctaaatttttctgcctttaccattttactcaaatctttattggtagctgatattattctaggatttatttttattgtggtatctccaccaactcttcttatttctttttcctgtaatactctaagcaactttgcttgcatactaagaggtaaatcggcaatttcatctaaaaatacagttccatcttttgcaagttcaaatatacctattcgaccctttttacttgctcctgtaaatgcacctgattcatacccaaaaaactcactttcaaataactcatttggtatggcactacagttaacaggtataaattgaccttttctctcactataatcatgaatagctcttgcaaatacttctttacccgtaccactttcaccccaaataaatatgctactatttgttctagccacttgttttgcaatcgctttcgatttttccaatttataacttttacctaaaatcttatcaaaactacctttagataaatttttgacttcgttctttagatattttaatgtatcatttactttttcaagttcaagagctaatatcttagcttctgtaacatcaacttctgtacatacaacaccgataaattcttctttataaaatataggatttgcatgaactaatgcatacatattttcttttttatctgtaaaatacaagtcactcattccaactttactatttagtactttttctgaaatagtattttccaaaaattcattcatcggtcgaccaactatatcttcagactttatatcatacctttcctccataaacttattccacaagataacaacaccttcgttatttatagcacaaattccttctttaatttgacctataatatacttcaaagtcaatccataatcttctaaatgcatatatagatagtccctaatgtgctcttgttttagaactccaataattttattatctctaagaacaggaagaatccctatattttttaatatcattatatctctacattcatctaaggttaaaccttcgttgacatatattacatccttcttcattataagttttactggttgaccttcatactttttatgcatctcataaagattatgtatatccgtcatggatataatgccttttaattggtcagatgaatctattaccattagagtttttgtgttgctttttatcatttcttttattgcatcttcaattcttgtgtcttcgtctatagttgtaaattttgtatccattacctcttctactttttttacttctggtatcgaaaacataaagtccccccctttatagtagtacctcatcaaaacttatttatatatatttattctagcatattataataattatttattaaataattattattaaaatttattaagtaattagcatttaaatttatataatcactttaaaatttataattaaatttatacaaatgaaatcaaatgaattatacccttagtatattattttttcaatactattttcaccttcaaaacatttttctattcatcaaacaattaatgaatgcctgtatccaatcataaatttaagaatataattaaaatagatatttttaaacaaactatatttgcatattatatttacataaaaaagtcccaaaatgacttataaatcaatttgagactttttattttaaacttaataataatataaattaatttctttttataaattaaggcgtaaaaccactatacctttaggttggtggatgtaaacctatcccttactttgtatgtatttttcaatcatttctttagaaacatttcctacactgaaagcaaagtatccatctgagcaaaaagttttttctgtatttacatacaaatatcaaatgtaccaataacaaacacttagaatggtttctactaacataattcacaactccaattcaatcccttcttaaatatatatggtttaattagttttacatttggcacttttttgatttcttttaaagctatatattgccctcaaaatacattaaaaaacatccttagaagtaatttttaagttttacttctaaagatgtctaacttctatttatctattattttatttttaatcttacgtcaccttttattcttcttattaatgggtgattaactgttctcattacatggtcagtaatatgatatacacctaactttaattttggtgcagaacccattactgtgttactacagtcagtacagtttcctattaatataacttctgctccagctttcttaaattcaatacatttttgagcttgtcctggacagtgtcctggattttcacattttaatgcacctttaatttcttgagcttgtttacatttttgaactgatactatatcagtaactcccattttagttgctatatctctcattctctcttcattaggtccacatgcacagactaaaagacccatttttctcttttcattaacaaatggcatagtaactattataccaccactagttttagttattggagcatctaaagtagtagctttaccagtgaaaggtcctcctaggattatttcaccatattcaccttttattccaccagctctttcaattaattctccgacagttgttccaattggcacatcttcaaatactatagactcttttccactgtttaattgaccaactacagttatatttttagatataactggtcttttttgctcaacagcctctactattctagttagtgtttctacgtttattactactgcattagcctctgaaggtaattgagttggctcaagtaattttcctagaacgtctcttactattgctctctcttctcccattgggtacatatcaactagttctgcaacttctatgttgtctcctggctttattacttttttgaaagcttctattgcttttggatgcttgctttttattgctagcataccttttccagcattagtaacttccatagcatattttataccttgataaactatttctggtctttcttctatttcttttatattatgagctaataaaggttcacattcagctgcatttgctaatattgttccaccatttaaatctatgtttaattttacatgagtagggaatcctgctccacccattcctactactccagcttctttaattaagtcaagtataccttctccttttaatggttcaaaagtatcttcttgtacttcatcagcttcaattactatcgcttggtcatttatttcacttatttttccactaacactggcataaatatttgcccctaatccagttggttctgcgattagagttcctttttttactacatctccaacacttactactggcttatctggaccaccaacgtgttgttttaataaaatagaatatagtttgttcaactagtacgcccccttaagtatattaatttttttataagctgttcaaataatgttaatgctatttttctattataaggtcttaacatattgtttatttctatagaacatatcgcttattaacaaagcaatttctatgccaacttttaaacaaacttataccctttggaaatactgtcttacagcattcattaattcttctaaatttttaaatccatcaaaaaaaagtcaattattagacacttttttaatcaatttaatctataattattgatattgcatacatgtataaaaagtgtcaaaaaatagacaccgtctttttatcgacacttttctaacatatactatataatttatcacaactttacttaaaatatacatttattacttattaattcttagttttttgcactccattggaatcaactacataattatctttatacaacaaatcagatattttgactagactgtatccatctttttttagtcgacttattatagtatccaaatagttatctacatcatttatattagcatggaataaaactattgaaccaggttgagattcttttattactttctcaattacatgatttggtccaagctccttccaatctatagaatctacatcccacttaattactttataacctaaatcactacaaatgtccatagctttattgtttacgtccccaaaaggaggtctaaataaattagtcttttttcctgttatattatatattttttctgatgtagtttctatctcttttgttatgtcttcttttgatatttccttcaaattggcatgagtgtttgaatgatttccaatttcatgtcctttttcatctatagcttttacaatttcttcattatcatccacccaactaccaactaaaaagaaggtagcttttacattatgtttatctaaaatttttaaaatatcatccatattatcagttccccatgctacatcaaaactcaaggctatttttttctcatttgtatcaactttatatataggcatttttgaattgtcgtatttagaacatatgtattttattccataaacaaaaacaaatattaacactaataataatgaaaaaaataaaacactatatatcaaagctttagtccttttaacttctcttttcatactattccccctttgaaataatttcttctatatttaaaatttattttttttcagctcaaaaaagtactgtaatatttaatttataagacaataactaaaaaaataaaacctatattgacctaattaaactctctaaaatactcatttatttaatttttttatattttttacatttttacctttatttttctgtatatattatttttattttggagaaattagtattaacatcacataaataaaagtgttgttagacatcataaactaattatttgaggaggaaatttactatgtcaaattcaaacagaacagtagttccagaagcaaaagctgctttaaaccaaatgaaattagaaatagctaacgaaataggtttatctaactatgaaaacatagataaaggtaacttaacagctagagaaaatggatatgttggtggatatatgactaagaaattagttgaaatggctgaaagacaaatggctggaaaataaatagtaaattttgacacctgggtatcaacagggctgctaattagcagccctgtttctctatatttatttataaaattgttttatatgaattattaaagattaataatacaatacaaattgttcttttaattttgtacaaattagtttaatatattatatatagaaatagtttgacggaggatgatatttatgtttgaaaactcgtctgaagaattagcctatcacaaacttttaattttatatatattagaaaaaattaaaatggatttaactaattctcaaataactcaagtagtattagagactgagatgatgaattatttttcattacaacagcttttatctcagcttatggaatctaagtttttgactacatataaagactctgacagagaatattatgctcttactcaaagaggcgtagaaagtctagaatacttctttaatcgaatacctactagtgttactgaaaaaatagacaagtatatagattctaacaaagaaaatctactagcagatactcaagtaaagtctagttttgtaaaacaaagtgataatgaatttattgtcaaccttagagtcatagaaaatcagtctaacttaatagatttaaatctaaatgtttcatcagagaaacaagcaaaacttatttgcaataactggaaaaataatgcatcttatatgtatgccgaagttatcgatttacttataagagacatacattaaagcctacaaacaaattatagttgtaggctcttttcctaccttgatttcttttattaatttattgtttgcagtttcataaacttttactgaattttcttgtgtatctgatacaaatagtagcttttcatctttagatatttctaagccttgaggaatcccatttatttcaatatttccaatgtatctactcgttgtataatctaaaattcttacattattataacccaaatcagcaacataaacttttttgccactataattaaatcttatttctactggtaataaaaattcatataataccttttttatatccatgcttacttcatctattattataagctttccatcaagtgttgatatatacatttctttcttttgtttatcaagctctatatgccaagctctaaagtccatatttattttcttttgtatatttttattaattgtatctatacatactatcgagtttatacacggtacatataattttttactttctctatcaaagtcaaatccatgtggcatattatcaactccaataattcctattggatttaatgtgtttttatctagtacatatatactattagaatcttcatttgccacaaacaattcattatcactaagtacaacttgactaagacttcctcctatagagacagtatcaattattttatcattacttaaatctaagacataaagtatcccattacttgaactaggtatgtatattaaatttttttctttttctatgcaaaaatggtgtggatatatattatcttctaatactatttctttttctagttcaagtgtagaataatcaactatgctaatactctttgataagtagttagaaatatagattttcatataacccctcctctctacaatacatatactacaataatatattatttcattagcttgtattatgctttatagttgcattattacgcatatatttggtattattattattgttaaaaaaagaaataatatttaatggaggtctttttaatgaaagtaacatttaatccaagtggtgtatgttgtagagaaatgatttttgaagttgatgaaaataatgtgattgttgatgctgagtttataggaggatgtaatggtaatttatcaggacttagaagcttaataatcggccaaaatgctcttgaagttgctgataaattaaacggtattgactgtggtggaaaaggtacttcttgcccagaccaattatctaaggctatacgtcaatctatataattacttatataaacatcagtaaaattattaaaaacttactttatataaaaagagttgtccattttttagacaactcttttttatatctttatttgtatatttattttataaaattataatttctttactaaagttctcactgtaccaatcatatataatgaacctgcacttattataatatcatcctcacttgatgtttctaatgtataatttactgcatcctctatctcatgctttgatgttacatcatctacatattttaatactttttctcttaatatatctgaatttatggcccttgggttatttggtgttgttgttattaccttattaaaatgtggcaacaatatctctaaaacactatcaatatctttatcttctaacatacctattaataaggttaattttctacctttaaaattcttatcaagtgcttttgccaaagattttgctccatcttcattatgtgcaccatctattataaaaattggattttcttttatcttttctattcttcctggccatttagtatttataagtccttttcttatagattcttcatttatatttgctaatttatttatgtcttttagatattttattacactaattgccaagatagaattgtttatttgatgttcacctatcaattttatttcaaggtctctataagtttctttcattacagtacaatcgtatatttgagaatttatatctgatttttttatgtttatatcatcaaaatcaacttctatatatttagcttttttctctttacaaactgactttataacatccttcgcttcatcagtctggtcatatactagtactactccattttcctttattattccagccttttcgtacgctattttttctattgtatctccaagtatacctgtatggtccaaacttatagatactatcacacttacaagtgattttgttattatatttgtagcatcatatctgccacctaaaccaacttctaatgccacaaagtctaccttttgttctgaatagtaataaaatgccattgcagtaaccacttcaaattctgttggatatgcatagccttcttttaccataatctctattttttcttttattaactcaattattctagcaacatcatcctgtggtatattttgtccatttactcttatacgctcagtaaaagtttctaaatatggagatgtatataaaccaactttatatccacactctcttagtatattagaaacaaaagaacacacagaaccttttccattagttccagctacatgtattatattcaaagtttcttgtggatttcctaataattctaataactttccgatattttctaatcctaatcttataccgaatttattagtttgtgatatgtactctaatgcttcttcatatttcattatctaactccccctgtattggcattttctcttatgctatctaattatagtatattttttacttttaatctaccgacaaagaatacatataatttaataccttctacattaaatttagctacaaatctttatttataagtttttatatctttccactaattcagtcagtgtatatattgaaactaagtcatattttgagatgtccatataattaaactttatgtcaaatctatgctctagctttttcaacagattaaaacaattatcataaaccaaacctatctccttattaaaaaggctacccttaaagagtttttcattattatcttcaatatctaaacaatccctaacaacgtcagcaactttcataagaagagcattttctttgtcatacaaatccaatttaaagtttacaattctactacactcatcaaaatcacaactatcccaatgatttctagttgctaatgattcaagcttatcatttaaatcagatattgttatgcctggtttttctgataatatcttagctattttaccagtaagctttgctgataaataactattacattttggtggtaatctataggaattatttatatcacaacttatatatgaattgctatccataacacattgaacatcatattttttgttgtaccaaaatgaatcatctccatctaaagtaaatcctcttacacctataacattgttaaacatagctggataacttaaatcaaaatcattagcgagtgaacatactattatttttccttttctaaacaattcgtaacaaacttcaaataagcccttaacactctctactcctatgactgataaacttaaattaattaatcttatgttagtgtctaaaaggtatcttaatgcttcttcaagaacttttatatttgtaataccatcttttctcaaaatttttattacaaataactctacatcttcatactctttctttattattgatgcacaagcagttccatgaccatcttcatcatcaaatttatctgatataaagatataatcatgcatacattcaaaagcaattcctccaactaaattatcttttaagtaatcatgttctttgtctattcctgtatctaatactgcaaccttaactttattattcatatcacatatattctccattacaaaagtttttaatatatctatgttaatagttcatcttaaactttgatttaagttgcacaatttatcttttaaatgctatatttcttgctaaaaacataaaataagtacaccatatatttaatttatatttattatatcaattattatcattaaatggttaaatgttaagataaaatttttagatttatatcacaatttaggattatttgtaaaaaaggagattatctttttattagacaatccccttgtatattttattaatatttatctatgattaagcatcaattttattttatactttttgattttaatactatacatctaaatcttatttagggggaacaattatttatatgatataaaaatgctaatttgaatgaacttgtcttataatcagttttataaaatacaccattctacaaagtatgaatcaaaaggtgaaaaaatactaaaaataataaatcaacatcaattttaaccaatatatgaaaaacttataccaagtatgcataaaaactaatataaatattattttaacaactaatacttacacctttatatattatatcatatttcaataaataaattgcataaaaggaaatcttttcatagaattaaaccatttattaattcattactataggttcaataaactataagatgtcgctttaatatttatattatactccattaaatattaatataattaattaaagtatgcatagctaaatgaaacaaatatctatagagttttataaatagtcattattttaaaaaggtaatcatattctaaaaatacatataatgcatataaaaatcaataatagtatattaataatcaggctactaattaataatcatgctactgtaatggaaactctacatatacatattaaacaatattaaaagtctataaactgatattttgcataataaaactgtcttaatataaataacattttatatattaagacagttttaatcaatagccctgtgatgacattaaatcttttttacgatattttcaattacctttttaaaattaatacattatatcacataacaagcttgttaatgctacttttaaatctttaagtctatacttacttataggtataaattgttcattaatagtaatcatattatccctaagatcttctattcttcttaaattaacaataaaacttgtatgacatctaaaaaagccattttcacacagtaatttttctgcttgtttcatgctcatattagctttataatctctacctattgtatgtacaactaaatctctctttacagtttcaacatataaaatagaatctatcagtattctattaaatccttttttactatttaaaactatataacgctccttctttctttgaaggttatcaatacaaagatttacacccattgcaaagttactatactctataggctttactaaatatctataagcacgaacctcataaccttggggggcatactctgaaaaagctgttgtaaatataatttctactttttcatcaaactttcttatttttttagccacctcaattccattgatatctttcatttggatatctaaaaatataatatcaattttttctgggtatttggatattaaatcttctccacaggaaaattccagtatttgataatttagacatctttcagacaaaagtttttttgtaaactcttttagtatgcttctttgtattttttcgtcatcacatataactaccctgaacataatatcacctccaaatctaaaatatcatttagtttactttatttcaatttccaaactgtactcactagctttcaaatttaaatttctttataaatttaagttgtcgattaaactacttatagaaattctctttaatatttaaacttaaattacgataaattcctatacttttctagatatattatgtaaaaaaatatagtaaaataaatataatatgtatttattaccctatattaaacatcataatatatcaaatttttattgcttataaattttaagacataaaattcatatattcacaacataaaataaaaatataacacatctgtaaagaattataacatcatatttgtatatatataaagaaaaacatacaaaaagtatagaatatatactttttgtatgtttttactaattcttatatttattttattttagattctaaatttgttaatctttcctcaacagatttaatcatctcttcaaatttttctttttttactttttcttcttcaattaaactttcaggagcttttgctaagaaaccttgatttgcaagctttccattaactctctttatttcgccttctaactttttcttttctttagacaatctctcaatttctttttcaaaatcaactaattcattaagaggtataaatatttcaacaccatcaataactactccaactgcatcttctggaacattagatttatcttttgctatctctacatttgaagcagatgctagagttataaaatagtctttaccaagctcaatagcttctattttttcttcacttgggattattatcaatttagctttcttagaaggtggtacattcatttctgctctcacatttcttatacttcttataccttccatcaataagttcatcatatcttcttcttcagccatgttatcttcttcattatattttggccattcagatactattatacatccttcaacagtaggaagatgagtatatatttcctctgttataaatggcatgtatggatgtaataattttaatattttttcaagaacataagttaatgtatataatgctgcagatttagcatttgcatcttccccatataatctaggtttaaccatttcaatataccagtcacagtattctgaccaagtaaaatcgtatatcttttgaagtgctattcctaaatcaaacttatccatgttattagttgcttcttttacaatattatttgctcttgatattatccatttatcagctagagttaagtcctctttaacactttctctagtcatgtttttaattatatcttcatcaatattcataaatacaaatcttgatgcattccacaacttatttgcaaagtttctagcaaattctactctttccatatagaatctcatatcatttcctggggaatttccagttgttaatgtaaatcttagggcatcagctccatattgctcgattatctccaatgggtctataccatttcctaaagatttactcatttttctaccttgagaatctcttactaatccatgaaccaaaacatggtcaaatggcttttcattcatacagaacatacctgcaaatgccattctaactacccagaagaatattatatcgtatcctgtaacaagtacacttgttggataataataatctaaagcttcagtcttatttggccatcctagagtagagaaaggccataatgcagaactgaaccaagtatctaaggcatcttcatcttgtttaaaatgagtgcttccacatttaggacacttatctggcatttttctagcaactactatttctccacactcttgacaataataagctggtatttgatgaccccaccataattgtcttgatatacaccaatctcttatattttctagccattgtaaataagttttatcaaatttatctggaacaaattctaattctccttttttaagaatatctatagctggttttgcaagttcttccatcttaacaaaccattgctctgataatctaggctcaactactgtatggcatctataacaagttcctacattatgattatgcgcttttatcttaattaggtaaccttgttcttttaagtctgctacgatagcttttctacactcaaatctatccataccttcatattttccacaaacttcattcatagttccatcttcattcatagtatttaactgctcaagattatgtcttaatcctacttcaaaatcattagggtcatgtgctggagtcatcttaactgcaccagttccaaactctaaatcaacataactatctgcaactattggaagttctcttcctactaatggaagtattgctgtttttcctattaaatgtttatatctatcatcttctggatttactgctataccagtatctcctatcattgtctcaggtctagttgtagctatttctaaaaagtcttcactatcttttagtgggtactttatatgataaaagtttccgtcgtgttcttcatgttcaacttctgcatctgataaagtagttttgcaatctgggcaccagtttattattctatttcctctgtatatgtgacctttttcatataggcttacaaaaaattctataactgcttcattacacccttcatccatagtaaatctttctttatcccaatcacaagaatcacctagttgtttaagctgattagatatttttcctccaaattcatctttccattcccaggctctctttaaaaattcttctctacctatttcatactttgtcttgccttcttgtttttttattctttcaacaactttaacttctgttgctatagaagcatggtcagttcctggaagccaaaaagcttcatatccatccatacgtttccatctgattaatatatcttgaagtgtatggtcaagagcgtgtcccatatgcaattgccctgttatatttggtggtggcatcattattgtaaatggttttttatctggatttggtttagatttaaaatacccttcatccatccattttttatatagcctagcctcaaaatcttttgggttataagtttttgataaattcgtattttccattgtcctgcctcctgtattttataaataaattttttaaatatctttagaaataaaaaagagctcttcatcctctttaaaaaggacgaaaagctcgcgttaccaccttaattccaaagcttaaaatacattaacatataattaaattattagttaatgttattttatcaactttgactctcaaagaatttaacggttctaaccgtctaaacttacttatagttcagtttagaaactccaaagctacattcagtaaatcttatacttagaaaatcttacagccagtgaattttcctctcttttagtagtatttacttactcctcttcttctcagtctttaatattacatattattatatacaaatattattctctttgtcaattatttttattttattttttctgaattttcttaattatgtctattctcttttatatagttgttatattttaaaatatgtttttacagttattctgtcttataatgtcaataattgcaagattattttattttaattttaatgctttctcattaattttatattatattatccttacagtatacctcttattcgtattttttatattatatgttttattttataaataatttactttatcttttactatatttaaatttattataagttttcttgccagaaatttttaggtgttatattttctgtaattggcaatattgtatatcctctctcttttaagattcttataatattatttaaagcatttaaactttgctctttctcatgaattaatactactaattcatctctttttcttccataatataatatattacttactatctgacttgtagaagacttccaatcctgtgtatccaaattccagtcccaaattaaataatcatttgccataagtttattatatgaaccttctggcatatatggtttacttccgtatggtaatcttattaattttgaactctgaccagttatttcttgtagagtattattgcatgtattaaattccccaactgttacttctgggcttttatataacttatgtatatcatgacttacactatgaaaacctattgagttttcctcttccaagactctccttacttcttccttgtgatttttcatattttgattaagcataaaaaatgtcgctttgacatcattttcttttaaaatatcaagtagtgcatttgtatattttgatggaccatcatctattgttatgtatgctactttttcagaagtagcccctggaccttttgtttcttcttgagatgctttgtatatgatttctcctaaagtattactttgagaaagcagttccagtgtattttcaccttttgaacttatattttcaactggaacattattaattttttcctccaataatgttccagttaaaattaaaacagctataagaaatatccttataaatacatgaaaaacagccttattatctttaattttcatcccccatatctcccttttataaaagcataagtttaagacttaaaaagttattttttatatttattctctttcttattactttttatatctctactaaatatttttttaaccttttcttcttctttttctcctaaagattctactcttttgattcccaaagaagttaaaaattgtaatacatttaaattatcaaatggagtttccatattcgtactttcactatattcatcaacattcttagtaccttcttccacacttaaaatacgcttcggacctcctacacagcctcctacacaccccattccttctataaatgtagcttctatttctttatttagaactttctttagaccgtccatgcactcttttgttccttcaaatgccttttcttcaaattttatatttttgtcaattcttctgactgataacttaactgctttacttacacctcctgttctagcataaactctacctgaaagggacgcctctactctattactctcatccattattgctggatttaactctaatgcatcaaatatttcttgcaactctttaaatgtaagcacaaaatcaactgcatcttttatatcttctaacattgcttctttcttttttgccatacaaggacctatgaatacaactttagcatctggatttaaaatttttacagctctcccacaagcaatcataggagaaacggatggtgatacattctccaatatctgaggaaaactattttgtatcaaactaacccaaataggacagcaacaactagttataaagcatccttcttcgtcctttttcatatgctcataataatcatatgcttcttttgcagtaagcatatctgctgccaaagcaacttctatcatatcttcaaatcctatcttttttaatgcagttcttaatttaccagggcttacatctttcccaaactgtcctacaaaagctggtgcaactattgcatatacagggctctttatatcttttaacaattttatcattggtataaattctattttatctgaaattgcacccaacttacatcttgatacacaatcaccacaagcactacatacatcttcctcattacaattaatatgcttacttcttatcttacatgactcatcttccttattattttcatcacaatatttgcaagcatctgatattacagatattattggtcttttgacttcatctaaatttacagcttcatgtagtgactcttttaaatttttatctgtatcttctgtcacatccaatcccatagttaccctaattaaatttaccatagtatctttatcaaattttccactaaaataattatttaaattatcctttaaatcttcatttaaaattttattaggtaagttttcaatatcctctatatcatcattccacactgcttttacaagttcgccaaaaagcttcattttatatatttctagtattttagaattgtcatttctagtattcataaaaaatagtacctccataaattaaacttatatatgtttaatatttacaaagatactattttttatttattatttaactactattattaatatgatttatttagctttctcaacaactctatttcaatcattattttcattagatgatagttgaatacggggcttttttcttcatctatattccagtctagcttatccacattatatgttttcttaaggtatttatatgtatgctctttcaaataaagtttattttcaagtaactctatagactgcatatgaaaatgtatttctctacatatccttaaggcattctcaattttttctatattagtttcactcaaactataatccaactcatcaataagttttgaatatatttcttctaatttttctacttcttcttcaaatttctctacatttaaattttcttttctaagaattttatcttcaataagtaacattgaaagttcttctatctttttaaattcatctataacactatttagataatttggtctagccacataataattaacaagtactccaaacaaaacacctacagatgtatctaacactctatgtaaagaataatacacagggtcactatttcctacacctagatgtatagccagaaaggttacacaggcaactactactgactttattttaaacagattgcataaatatattgagcacattactcctagaccacataaaaaagggtctccagctttaatgatggcaaatatgaatcctattataccacctaaaatagtaccttccactctattgattcctgtctttaaagaaccttttaccgtatcttgaacagaaattatacatgctactagagaataaaacatattctctactagatagttaccaagaatcatacataaagtgacactaattcctgtttttatagtcctcatacccatcttttgaagtttcaaagttccacctcctaaaaagcaccttatataaaatacgcatcctcatatttaatatgttcctagtatatcacaattttttaaatttacccattaatcatatttttttatcaattctttcttaatttagacaataaaaaaactgctttaaagcagttttttatcctatctcaaccattttaccctcaattgcaaaaattatcttctcacatacatttgttatatggtctccaattctttcaaggtatcttcctataagtagaagttttactccttggtctatagtatttgaattttcatgcattatttttaaacaatcaatttgtacttgttcatacaatccatctacaatatcatctttagttccaacatcataagctatacttgcatcaaataagattaaagcttctctagtctgagacatcatagacttacattcttttgccatcttaggaatatctatcagctcttttatataagcctctccacctatcttcaacatttctctagctatatttgctgcataatctcctattctttccaactctatcgatatattacctaatgaataaataaatcttaagtcccttgccattggttgctttaatactattagctctatactcttatctcttatttcttctcttaatttatttatttcttcatcatcttctactacttttcttgcaccctctaaatccttctctatcatacaagtcacagacttttctattgcttcttcacatttttccatcataagtactgtttgttcttttaaagtatcaatacttatatctaaactattattgaccattgtctaactcctttatagttatatattttaaccaaatctacctgttatatagtcttctgttcttttatctacaggagtggtaaacatagtttttgtatcgctaaattctataacctctccatttaagaaaaaagctgtttcatctgatatacgagcagcttgttgcatattatgtgtaactatgactattgtgtagtctttttttaaatcctctataagttcctctacttttaatgttgaaattgggtctaaagcagatgtaggttcatccataagaataacttctggtctcatagcaattgctcttgctatacatatacgctgttgttgaccaccagaaagtcctagtgcagatgatttaagcctgtctttaacctcatcccaaatagctgcaccttttaagctttcttctacaattttatctaattgcttcttatctcttagtccatgtgtacgaggaccatatgccacattatcatatatactcataggaaatggatttggtttttgaaataccattcctactttagtacgaagatttataacatcatctgaggtatatatgtcctctccatcaacagaaatgtttcctttaattgttacatcttcgattaagtcattcattctatttaacgttcttataaaagttgattttccgcatccagatggacctattaaagcagtaaccttattctcttttatatccatatttattttctttaatgcttgcttatcaccataaaataaatccaaatcttttacactcatttttatcttatcgattaattccattattcacacctcttaaatttaataattagctttatttaatttcttagcaacaaatcttgctagcatgtttagtgctaatacaattactattaaaacaattcctatactggctgctgttgctatatctccactctctttagtcagtaagtatgagtgtacagttaatgttcttgcactatcaaatattccacctggcatcttggctacagtacctgctgtaagtaatattgcagctgattctccaattatacgaccaactgataagattactccagataagattcctggtattgcacttggaagtactaccttatataaagtttgaaattttgtagctcctaatgccaatgatgattctctataagcttgaggaactgtttttaaagcttcttctgttgtacgaattattactggtaatattattattgcaactgtaagtgaacctgcaactatggaatatcccatttttaatgtaactacaaagaaaattcctccaaataatccatatactatagatggtatccctgataaactttcagttgcaaatcttatagctgtaactgcttttccttttttagcatattcttgtaaatatatagcagccaatattcctataggagttgctacaactatagaaactactactgtatataatgttgtaattatcattggaagtataccaccatcacctgatgctgaataattgctaaataagaaattaaaattcatgttgccaattccctttataaatataaatcccactataatgactaatgatactattgtaaatagtgctgatagatatactaatgacttcaatagattctctttgaactttctcatcttaatttaccgccttatttgaaagtttatttaaaactaagtttaaaattaatataaatgtaaacaatactactccagttgcaaataacatttcttgatgtgtaccaaatgcgtatcccatttcaagtgctatattagttgtaagtggtcttacactatctgttattgcagttggcataactggtgagtttcctgcaacaagtattactgccattgtttcacctaaagctcttcctactcctaatactactgcagctaatactccagatttcgcagcaggtagtacaactttgaatattgtttctatttttgatgcaccaagtgctaatgaaccttctttgtatgcttttggtactgctcttattgctgtttctgatacagatattattgttggtaacatcattactgctaatactattactattgctaacaaactttgaccttttggaagattaaatatactttgtatagttggaactatcactgcaagaccaaatacaccatataatactgaaggtatacctgctaaaagttcaactgctggtgacattatttttgctaatcttttaggtgctacttctgctataaatacagaggttaatataccaacaggtactcctatcacaagtgctccaagtgttgcaaatattgatgctactatcatagatgatattccaaatttattggcagaaggaacccaatctgcaccagttaaaaagtctataaatgaatatccttcaaatataaatggtcttaagcctttataaaatacgaatcctattatcaaaagtaaacttgcaactgctactaaagcactaagtagaaaaatattttttgctactttttcaattacgtattttgtcttattgccattattgtcatttttttctaaacctactaatctagattttactatcataataccctcccattaaaatatacttatcgattttcgttctgtattcaaaatttaattttttataattcgtcttcatcaaatttcctgtacttttattctactttttttaagttaaatctatattaggattaagttaagcaagtgtaaaattatatttacttttttaacattaattttacttttaaaactatatttgacatttactttacaatatactgttgtttctctatattaaaatagcagatatagataataatacagtttatgtataatttattacctatatctgctattaagatttgttaactaaatttaacttttatactacatatataattatcgtatcctctagtttatatcactattatttctatcaaattgttatgatacttgatgtttgcaataggtacgaatagccaaaaatataaaaataggtatttctatcactgagaaaaacagtataatgtgtggtgtccaaaaactcatacctcctaagtgtaagaaattaaatgatgtcatttgatataataaactaatcttaagaccaattccccctggtggtaataggtatccaatccaactaacacctattcccataggaattaagcaaatagaaaaagcaatcagcatagaagtaagagaatccttacattttgcagataaaaataatgttaaactaaccattgcaagtattgaaattagaccaccaatagctataagaatctgtgcttgtagtaaatttatatttactagactaatgacagaaaacaacatttgaaatgaggttttcaaacattcagtaccaaaagctaaatcagaaattgccaaatggatagaaatacatacaacaaacattactataaatatagaaaatagagctaatattttagtaaacgctagacgagtatgtccatgtttcgtacaacgaaggatgctatctgattgtgtctgatactcaccagaaaaagtaggtgcagtaattgcaacacatataattaataatataaaaatgtaaaatattatataatcgaaagcatctttagaataacctgggtatatctcaaatggagtatctacttttctataaagttcttgagctttcatttgtgcactggaagtttgtcgttcaatcttcataatatcatttaaatgagttttgcattgttcataaaaagaatctaaatcatttgtatttatttctgataattctgttgcaaatcctgtttctgaattagcaaatgcttcaggaagtctattcaacaatgggcgtattggtaaaatacttttagaataaatatctagtgggaaatcttcactacctactttaccatacttttcttctgtttttttccatatatttaaagcatgctttaatttttttggtgttacaactccactactaatttcactattattagcataaattgtttttttatatttaatagcatctaaaccactcaattcaactaccttgccattattatctaaataattgataccctcgtaagtaattggaagaaaagccatcaatgcagataaaaccaatgccaacaataataaaattaatgtacgacgtgagtgcaacactcgtttaatttccaaataaaaaatacgcatttatttcccctccttactataaactgcttctggaaataaccataaatataaatcttctagtcgtggttcaacagcaatagagttatcaatttgtgacttttctgccaagtaacgaatagatacttgattgtttttttcactacgctgattgattatacgtaaattcatttcatattttgaaatatctctatttgatataagacattcccatactttgccctctactttcttaaccagtttatcggttgttcccacatcaagaatttttccacttttcataatagcattttgagttgatatgtactcaatatcagatacaatgtgagtagatattaggacaacacgattatgagaaaattctgaaataaaattacgaaatctcactcgctcaccagggtcaagccctgctgttggttcatccattataaggattttagggtcatttaacatggcttgtgcaattcccactcgtcgtttcattccaccagataatttaataatctttttattttttacatcagataatgtaagaatttccaatagattattaatttttccttttacttctcttggtggtacatctttcaatgctgctatatattctaaataatcttttacagaaaaatcctgtgggaaaccaaattcttgtggtaaaaatcccagtaaatttctgtactcagcacccattatataaatattttttccattatacagaattttgccattggtaggtttcataatgtctgtaataattctcatcaaggtagttttacctgctccgtttgctcctagaaatccccacacacctggtgttaaggtaaggcaaacatcttctacagcaattttatccttaaatttttttgtcacatgttcaatttttaattccatatttgaaactcctctctttatctacttacctgcaaaaacaaaagtgtcttgcttagtatttattttactaaacaaagacactcataattttaatattaaatagataatttcttaagaaaatcctaatatttgatttatattttactaaatagatgtaggaagcgatatagtaaatgttgtgacttcatctttactttgaacagtaatatcaccaccatgcaaatttataatttccttagctatagaaagccctaaacctgcaccacccatatcagattttctagcttcatctaaacgattgaacttttcaaatatagcagaaagttgttcttctggaattgtctgtccataatttctaaaagcaatatctaccttgctgtctttatgaaccgctgagataataatttctgtattaggatagctgtaagcaatagcatttttcaagatattattaaacactcttgcaagtttttcagaatctgcttttattgttaaactttcatttgcttttagaatggctctatttcctttttcagacagcaatgggtaaaattcatcctttaattgaagtaacatataatataggtctactttttcgaaattaattttgatttgattagaattatatcgtgttatttcaaaaagttcattgataagtttttctaaatattgtgctttgtcaagtgcaacttcagtatacttagatttttgagaattatccatattaggtatttcttttaataagctcaaatacccaataactgaagtaagtggtgtccttatatcatgtgctagatacatcacaaggttattctttttattttcagcctctttcactgcttgttgacttaacaaaacagacatcttaatttggttcatttgttgctctatttcctttaatggcttagatagttcaaccaattcatcattttgttgataaatagtatgtgttgcattgatgatttctcttaaataattccatggttttttccaataaaaattgaaaatagtgatatatccaattataaaaaccaaaaaaaataatacatctcttctcaacttaagccatttaacaagaggatttgaaaaatttgaaaacgtataatcagccataaacattaaaaccaatactatacctgtatagatagctaacattatatataatttatactttaaatacgcctctgtatttttttctctttttataaatttatatttatctcttagtttcctataagtaaaattattaatctttttcataatactacatcccttcttgacaagaaaaataggtgtcaaatcttgtaaccaacaccccaaattgtttttatatattttgcttcatctacagtatcacctaatttttcacgaagatggcgaatatgaactgttatagtattgttacttttattgtaatattcatctttccagatagcatgaaaaagattttctgaatttaccacagagcctttatttttcaataatacatgtagaatagaaaactctgttggagtaagtgaaagagctttaccatttaaatggcattcatatgtttgggtattcaattccagacctaaaaaagaaaaaatatgtgaaagttcttcaccagattgtaaacttccactgtatttcttatatcttctaatctgtgccttcactctagcaacaagttccaaaggtcggaaaggtttagtaacataatcatctgcacctaaagttaagcctgtaatcttgtctgtttcttcatccttagctgttaacataatgattggataagtatatttttctcggattttttggcataaagaaaatccatttactcctggcaacataacatctaaaattgcaaggtcaaattcatttaaattaatgcagtttagtgcatcaagaccagaataaaatttataaacaatatagttttcatttgtaaggtagacttctattaaatcagctatatcacgttcgtcatctacaactaaaatttttccactcatagactttaaacatcctttctatatatatttatatatattatactaaatttaatttttttatatgattttttacattagaatttattaagaaattcttaatcttattatgtaactattttattatttaacatatattaaagataaaaatgaatatatatagatttagatatacaatttatctatcttttcaaatataatctataaaataatagttctgttacgcattttttcatataataaaactgactgtaatttaactggcaaagtctagaagaataggctttatcaattaaattacagtcagctattttataataatttagtttagatatcgttagcatttcacatttataacaattattaatgagattaatatatttattattctttattaaaataatatcctgctcctcttattgttataattttctgaggatttttataatctttctctattttctttcttaatccattcactgcaactaccacactatagttatcctctaagtactcattcatccatacatgttcatatatctctttagtagtcagagtcttttcaggattctctataaaaaagtttaacagcttattttctgttggagtcaattttattattttgtcttctaactttattactccactagttctattatattcctctaattttgtattattttcattattatttacatatgagttcattcttcttaaaatagcttttacttttgcatataatatttctaaatttagaggctttattaagtaatcatctccgccagaatttaaagcatttaaaatgctttgttcttcatttatataagtcatataaacaattggacaagtagttacatttctaatttttttacaaagagtccatccatcaccatcagttagaattatttctaaaaatattaaatcatatttattgctaaatatttttccaatagcttcttcacaattatatgctaaatctatacttatttctttttcctccagaaatccttttagcttctggcaattatccttgtctccatctattatcaatatcttagtttgcattataatcactcccaaatatcattattcttttatattaaataagctattattataaaaaacatagacttaattttattgtaaaaacagttccttttcctagttctgaatctacaaagatttctccgccatgctctcttataatggatttgacaatatataaccctagcccttgcccttttggctcattattatctctttctgtaaagaatctgtcaaatacctttggtatattttctggaggtataccttttccattatcagaaactttaataattgcaaatccatcttctttatccattgataaaattatctttccatcaaatggagtaaatgtcaaagcattataaattaaattctcaaatgctcttgtaagcatctctttatttatctttgcatatatttttttctccaatatgtaagtttcaaagtttacaccacatgcttgtgtatctggcaagttattttcatatatctctttaataaaatcatttagacatattttttcactaataccaatgcttttatcttgtgatgtaaattcttgcaaactacgtactctattttgtacttcatttgacttttgatttatagcataaagataggttcttgtctcttcatctacatgaatattaccaacctttatcaagtctataaatgattgtatagctgaaacaggtgcctttaaatcatgtgccacatctgccaagaattttttacgttcatttaacaatgttgtaagttcattagttctcacttcaacttcatgttcaagattccttgtaagtttttcattctcttttattattattctattcctgtttatcatcataagagaaaataaaataacaattataaatccacaatattctgtttgccaccctgtaaatataggctcaaatctattactagtaactgcatcaaataatatgctaattccaaaaacagtgtttactgaaactaaaatataagaacttatatgctcagagcatgtctttttatatattgaaaccagcgaagacattaatatatatataaatacaatatatttatatatgtctattaatttcccatatatgttgacaaagtacatatcatatggaagaagaataattggtatcactatagatatgatactcattgtaattcctaatggtaaaattaaaaatctatacactttatcttcttctattttggatatacttccatttatacaaataatacataaaactaccataaaataggacgaatcttcaaccgcatatgtaaagcttaccaaaggcagtcctaacaaatgtacaaagggataggatacatggatggcaaagaaaacacacatacatccaaaatataagtaaagtttacttttgtttgaaagaaaccatacagacaacgaaaatatagctattgcaaaagttgtgaagcaaattatactataaaaaagtaatcgataaaacatcatattacttatgtcctttgtttctcctaatgcaggcggataatacaaaccactataataatgtgaaaaattcgatacattgattataatttctgtatctttctttgcaataaaacttactactgaatttttaattttgggtctatatttttctgttcctacatctcctaatttagaaactatttctccatttatccatacttcacttgcggaaaaaatctcaggaagctctaaacttagtagcttatcctcaccttcattttttattctcatacgataagtagcattcccatatggtgactgattcccttttctcatagaaaaatctggatattgacctataaaaacatattctggttttatatcttgctctgtaaaatcattcggtttaaatattttatgattataaaactcccagtcatctatcagaaagacaagtttacctttagtgaaagtatcattatctatagttaaaattccattacttgctctaatagacttatatgtatatttattatcatatttatacagaagatttaatcctgctattgccaacagagagactatcaatacaatgagagttccttttagtatattatactttttcattgcatcaaccacatctctttcatagtagtattaaataaaacaagaactatttattaattacagtatctcacttatggtacaaacttatatccttttccccatacggtttgaatgtattgatgctccctgcttaaagaattaattttttttctcatctgtgcaatatgaacctgcactgtatgttgatctccaatatcaggcattttccaaacttggttatatatctctatcttcgaaaatacttgttctttgttttcagctagaaacaataatatttcaaattccatagtagttaaatctatactttctccatcaaaagttacttttcttgaatttacatttattactaacgctgaaaactttaacacattaggaactgatgtaatatttttgtactgcctcatacgagcatatattctaagttcaagttcttttaaactataaggttttgttatataatcatcccccccagctaaaaatccccgaactttttcttcttcatgctcataattagataaaaatattataggtatgttaaccttttcttttatatcattgcacattttatatccatctatatctggcaatgaaatatccaaaattatacagtctaaaactatacgctctactatatccatagcatctttagcagtctctgatgtatatacattaaaacctatattagaaaaataaatttgatttatatttaaaatatcaacatcatcatctacaaccagtaaattatacattacaccactccattcaaaggtattttaatcataatctcaagttttataattattacaaattataatgttttattttcatatataactagtattattattttataatatctttacaaactagactataatacttaagtatttttgaacaattcttgaatattgtattgaacattaagatttattattaaatactaattaaagtctccgattgttggagaatggagcttaaagtcattttcacttataaatttattatttttctagaaacttgtctattggctagtttgagtattgatttatatgatttatatggttataatataaaataaattgtattattttggtaaatatattgttacaaaaggtttatattttgcatctcaatgtttataaaaactttattttcttattataatagtattatactttttaaaaaatttcccttttccaacaaatggctactttaaaagccaaaatttcacctatcaataaaaatcttaacgactaatactcttattttcaaattttgcaacatttttgttaattttaaagcaaaaaaagactatgcaatataaaaattatattcatagccggttgcaccactaactccatatatctccagatgcccaataataagatatacttctcagtttctaaaatatttttattaaaaatcttttatatattttcataaatttcttttttattctaacattgtaatattattttgtcaatatttccatatttttagatataagatactaaaatacctattttatctaaagatatttatatttctacattcaataatagacaataccctgcaagttaaagcatcatttttatgagcttatctcacagggtattatatgtttactttatattataattcatgttattgattaactttaataaatcctttttctgaaacaagtgcttgtccttcatcacttaatatataatctattaaagctttccctttttctgacaaaccatcttctttattaactaatataaatggtcttgatattggatatttattagccattacatttgcatcagttgcttcaacatcatttatttttaaactatttactttctcatcaacatatccaaatgatatatatcctatagcattttcatttccttcaactgtagtttttatatttcctgaaccatcacttatttgtgcatctttagttagttcttctgaatcaaaccctacaatttcttggaatccatctctagttcctgaaccttcttctcttgatactattactattggtgcatcatttcctcctacttctttccagttagtaatctttcctgtatatatacctttaacttggtccattgtcaggttttttactgagtttgcagtattagttatcaatgctataccatctattgctattttagtttcctttaatccagcacttttttcttcatcttttaaatctcttgaactcattcctatttcagatgttccttctatggcattttttatacctccggaagaaccaatctgttgtacttctacactaacaccttgatttttttcttgaaacttttctccgatagtttccataagaggacctattgaagttgaacctgaaacagaaactttgcttgaatctcctgaatcacctgaacctcctgagttagaactacatcctactgctaaagctccaactaacattgtactagctaaaagaacgcctattttctttttaaacattttacttacccccgcttatattttaattttttgttgtcatttttctatattttaataatacagattctttgttaaatgaatattagagcagggttaagtaaatgtaaatattgttaaatacatgtaaaaacttaattttatatgatttattcttaattagattaactttttaaagttactttaggcagatataaacacaatacaactcatattatcagaagtcttcattgaagctatcaacctatcacatcctataattctttttctagtttattaactaattcagcaaatacatttaaggcttcctctatagattcttttttagtcatatctacaccagcagattttaattgttctagtgggtattctgaccctccactttttaagaagtttatatatctatctactgcagtacttccttctgaaagtatctgttgacttaaagcacttgcagcagaaaaccctgtggcatacttatatacatagaagtttgaataaaaatgaggtattctcgcccattctattcctatttgtttatctactattgcagattttccgtaatacttttcatttaatttgtagtatatattagtaaattcatcagcagtaagtggttctccactctctaccctttgatgtacaattttttcaaattcagcaaacatagtttgtctatgaactgtagttctaaattgttctaaataataatttaataagtatatagtttcatccttagacttagaattttctaataaataatttataagaagtaattcatttaatgtagatgcaacttctgcaacgaatatcttatagtccgaatataaaaatggttgacttgttcttgaataatgactgtgaacagagtgccctaattcatgaattaaagtgaatagagaattaaggtcatttttatagctcattaatatataaggatgtgaatcataacttccccaagaataagctcctccttttttaccttcattatcatatacatcaatccacccttcatcaaaagcactttttatgaccttcaagtatttttctcctaaaggtttaagtgcctctaatatgatatcctgtgctttatcatatggtatatccatgtcaaatttatctgtcaaaggaacatacaaatcatacatgtgtatttcattcaatcctaaaaatttctttttaagctcaacatatttatttagattaggaatacttttatctatagctgatataagattattgtaaacatctaaacttacatcatctgaaaataaagacgcttctattgctgaattatactttctagtttttgcgtaaaatatctctgattttattccaccataaagcgttgaggcaaatgtatttttatatttctcatatgttgaaaattcaccttcaaaagcgtcttttctaactctactattcttactttttataaataaagagtagtttgaatgagaaagcttaaccttattaccctcctcatcttctatctcaggaaattccatatctgcatatgctaacatatcgtatacattttctggaattgtcgataattctgatgtagctgcaagtatttcttcctctcgttcactcaaagtatgtggtttatctctcaatatatcctttatatattttgtataaaaggatagcttctcatcttttaagtattcacttaacttattctcttctatcgccagtatttctggaactatataagaagtagccacacctaaatcagtagataacatttctgtcttagtggctcttccttgattatcattaattctagtatcttcatgttgtttcatatgagtatatacatataaattttgaacaatcctagatgcattttcagagatatttaatactttatataagttctccttactctcagaaagcttccctttatattcttttacttcttggataagattttttactttacttatgtctttttcaatttcctctttactggagtacatcttatctatcttccatttgtacttttcttctattgtacttctatcagttcccatatcatacacctctattttaatttgttttatattttattcactttacaaaatatattgtatatattttagtccaaataatctacatttattactccttctatcatatttatttctttcataacgtcgtgtaagtgtattctcttagcataagatacaaaaaaattaaccttccagtattcttcattacgacattctatttccatatttcttacgataagttgatttttttcaaatttatcatataaaaaaggtatagagtccaaattgcttaattttaatatcaatacattcttttcttggctaaataaaaacgtattgattatcctaagcacaaataatgctatcattacaaataatccacctagaattgccaattcataataaccatatccaactgctataccaatacatgcagttgcccacatcccagcagctgtagtaagcccttttactccacctttattttttaaaattgctcctgcacctaaaaaaccaattccagataatacttgagcaggcattcttgctgggtcagcatttgtatacaaattataatcaaagaataattgaatcgaagttattgaaacaatacaagaacctattgcaattagtatatgtgtcctaaatcctgcaaactgtcttattttttctctctctaagcctattattcctcctattattagtgctaatagtaaccttattgctatctccttacttcctatatcaatcataatataaaaccctcctgacttaattacaacttatgtcctacagataatttacacatcagaaatactattttatatcttaatattattattaatatatgtaaaatatagccatctgttaatttttgatacaaaaaaacccacaactgtgggctatttgcttaggtacatgtatttatttattaatatatctattttcttacttgattctactaactcttcttgaaatatttctggatattctatgtatgtatttatctcttccctaactgcttcaatctcattttttaacgcttctaattcattgttcgccataataatcaccactattacaaatttgtatatttttatatacattttatcaaacaatattatattttgtcaatattatgtcaataaaacttactataaaaatgctttaatttaggtattgtatacctggatactaagcctacaaacataccagttactaatgatgccattaacataaatggtaagtaccctatagcaagtatattttctatgattaaacttgcaactattaattgacctatattatgccctattgcacctataatgcttatccctattagtgataaatcttttattttactcgctaaatacataaataaaagactcagataagctcctcctatactaaatagtagatatgataaagggcctgcaaatattgatgacaaaattaccctgatagtaacaattataacagtatctttgacacctaacaacattaatgaaattaaagttataatattgctcaaacccaattttgcccctggaaatataactataagaggatttggtatatatgtctctagtacatataaagctaaactataccctatcataagacctaaaaatgtcatttttctagttttcattaagttaactcctccaaattttatctatcatcttacattataatacaaaatatataaaaacacctaatttagactaaaatatttttaatctatttagaataaatattagttatttcaatgtgcaattacctctataaatcttgactttttgtatcatacttgttacaattttaatgataatgaatttcattaggaggtgttaataatgactgtttacgatttaaaaataggagaaaaaggatttattaatagtatagatggagatattaaattatctaaaagattgcttgcacttggatgtataaatagtactgaaatagaagttaaaaaggttgccccacttggagacccaattataattagatttagaggctttgaccttgcgattagaaaatctgatgctaaaaatatttctttacaataatagaggaggagctacccgtgattaatgtagcattattaggaaacccaaatgtcggtaaaactactgtttttaatctacttacaggttcaaatcaatatgtaggtaactggcctggtgttactatagaaaaaaaagaaggatttcttggaaaagagataaaggttgtcgatttacctggtatatatgcaatggatactttctcaaatgaagaaaaggtttctaaatcatatttagaaaatgaagatgttgatgtaatagtaaatgtagttgatgcttctaatttatcaagaaacctttacttaacaactcaacttatgcaatttaacaagcctatagttatattgcttaatatgttagacattgcagaatctaaaggagttaatatagatgccaaaaaattaagtgaagaacttggagtaattgttgttccaattatagcaaaaaagaaaaatggtgttgataggatagaagaagagattaagggagctacgcaaaaagcttttatatatcagaaaaactttggaagtgaaacagaaacatataaaaaattagaatccattttatcgagatgtacaaaaactacatatacacaaaagaaatctatcagtgataagatagacaatatagtcttgaatcctatattagcatatccgatatttattggtgtattgttcctcttatttaaatttacctttgactgggtcggaggaccactacaagagggatttgctagtcttatagaggcttatatttctgcacctgttagtgatatgttatctaactctagcccatggtttaaatcacttatagttgatggaataattggaggtgttggtggtactttaccattcttccctttaatatttacattattctttggtatatcgttgtttgaagatagtggatacatgtcaagaacagcatttttaatggataaagttatgagaaaggttggtctatctggtaaagcttttatacctatagttatgggtatgggatgttcttctccagctataatggcaactagaacattggaaagcgaaaaagatagaagagttacagctcttattgcaccacttatgacttgtggagcaaagctacctatatatgcactatttgtagctatattctttccacataatgctgctttagtaactacgtcactgtatttggtgggtatagttatggcaattgtagttgcattattcttaaataaaacagcctttaaaacagaggctgaaccatttatattagaattaccagaatatagaatccctactatagatgcacttattaaaaatacttggaataaatcaaaaggtttcttgataagagttgttactgtcatgtttgcaatgtcagtcgtaatttggggactttcttcattcaatgtttttggatatacagaagatataaatgtaagcttcttggctactctaggtcatattatatctcctatattcaaacctcttggttttgatgattggagaacttcagttgctattttaagtggtcttggagcaaaagaaatcgtagtaaactctttaaatatactatatggtaatctaactgttgtcttaccaacaatatttaatggagttactgcatatacattcttgatatttactgctttatatactccatgtatagctgcacttgcaactatgaaaaaagaatatggcaataaaatgatgtttacatcatttgcatatcaatttatactagcatggataatggcttttatagttaaaagcataggtggagtactatttatgggtaattcaataatggaagctttgataggtggaataattatagtccttgcactctttattctgtttaataaattcaagtctacaaaaaacggaaatgtctgtagtggatgttctatttgctctggatgtccaagtgctaattcttgctcaagtaaggaagacagcaataaaaaaagtaatacacactaatatataaatattttagtttaaaataagataaaagtgggtgtctcaaaattaactttttagttcatgaggcactcttttttatataaaatcaaatatattttcatcatttcaacagtcaaaaagaggcttatctctattttgagacaacctctttttttgttacttattcagtttcttgctacctaacttcatgtggaacctagtatcttttggaacacttgggtctacgcctcttaatgtaggtatttccccacatattagttgtataggtactataaaattaaatgtttgatagtaaggattatctgtgatatcaatctttaaatttttatcattttctgtaacatctctacctatagcaaatacattttccgtccaaccagaaagtacatcaatcatcttagttactctaggttcttttcctgtatctagtataaatatagtagaatcactatttatagcattatatataccgtgtataaactcttcaaactcatacccagttacaggtattctcattgtttccaataattttaatgctgcttctaatgtatctccatatatatcagagtgacctattattcttatttctttagaattaactaacttttctttgtttctttcaatccattgtttagagagcttatacactgcttcaaatctattaattgcatctaatatcttatttatttcctcattgtacttttcactagatattgtacctttttctctagctatttgaagacctaataacattaagtttaactttgtacaataatatccttttgttttagctccagatttttcttcaccacaatttactgttaatatataatcagaaatctcatctattaaagcattcttacaacctgccatagatgctattttacaacccttatcttcagctaacttcatagcgttgtatgtagaataactactcccaccttgagatacacctactactagggtattttcattatcaaacttgaatgtatcttcagttatcataaatggatacattttcacaacatctatatctaataaattttgtaaatatggttgcacttgcactcctgagtgatagctagtacctgaacctgttattataatcttttttagatttgctctcttaacttcattaaataagctatctgcattagatataatttctctcattctaactggtgtttctaacatataatcttgtattgtcattttatacaccttccttatctatatattcaataaattataattaatttctataacaaacctatagcatgtaaagcgattcctgttactatagtgcctatagttaattttgttacacttacctttctcttcaacatgtaatatattaaaaatgcaaaggttaaaggtaacatattaggtattattttatctagtatatcttgtaaaattacttctgcaccatttaagttaaatttcaaaggagtagttatactcaacatagttgcaaccattcctcctacaacgaataaaccgacagttgtagccatagacattatcttctccataagtccctctctttgtattctttcaagagaatttacccctactttataaccatacttaagtccaaatattctaagggcaaatgctggtatattgtataataataagaataatagtggtccaaagatattgccttcttttgcaagtgatactcctactcctgctgctataatcctaaatgttccccagaataatgaatcaccaattcctgcaagaggtcccataagagctgttttaacagcactaattgaactttcatcaaattctggattattagcattttcttcttccatagctgctgttatacctaatatagcaggaactaccactgtcgttgtattaaaaatctctaaatgcctttctattgcttttgcttgattttctttcttattatatagcttctttattgcaggtaacattgaataacaataacctaagttttgcattctttcgtaattaaatgcaccttgaagagcaaatgaacgccaaaacatacttcttaattctttttttgttaatttattcaaagtcaatctctccttccgttaaagtattcattgctaattgaggattttgattattttctttgttattgatataaaagtttagtacaaatgctacacatactccaaataaagctatagcagttatatctaatccaccataagatgctaacaaaaaccctataaagaaaaatacagacatcttttttgaaatcaacatatccataagcaacgcaaaacctactgctggcaacaatgttcctgcaacacccaatccgtctaatataactttaggtattgcatttatcaatgttgtaactttatcagcaccaatcataattgctaaaaaggttggaactgatgtacttaaaaagaataatattactggcaaccacatcattatggtaactttcttaaaatcagcctgtttagcatagaaaactgccttttgagaaaagtacgaatttattattctaactaatactccaagagattgtgctaatactgctactggcactgccactgctaaagcaacttctgcaccattacctgataatatagcaaaagctgtacccaatacacctcctgttactacgtctggaggagtagctgcacctatccctgcaattcccatccaaattaattcaagctgtgcaccaatcataattcctgattttatgtctcctaaaactaatccaactaacatacctgtaactattggcctatcaaacatagattgaccaaatatacgcccatctagtataccaactcctgctataatagctaacatagtagcttgtactaacatattgaacctccattttaacttagtttaatttacattaaattacattacatttttgattttatttcgattttctaataactcatttacataaacaattccattttttgcttcctctaagcctgatttaactattagttttgtatcctcctcaactaataagaatatagataaaagcattggtaaatttacgcctgtcaacaattcaaatttgaacccttgcaaaagtaagtttgtacatatatttgccacacttccaccaaacacatctgttaaaacaacaaattcttcactatctttattatttgataatatacttctaatttctttctcagcatcatctgctgatttatcttttgtcatacaaaaatactcaatattagctaatgaaccaattattaatttacttgtgtcaacaagttctctagacaattctccatgtgttgcaattagaaattttttcattctctttctcctaaattattttattaaatctgatagttgtttctttttgtctctaggtaacattctaagttctatatcaattcctaaatcacctatttctttaaagttatttatatcatcatcatcaacagcaactaaatctgtaagtttcttttttccttcttcatatcttaaccctcctacatttatttcttttaatactcctcctgaatttttagctacaactaaagcatctctggtattttttactaacactaatacattgcttttctttgaagaagcaaatttttctactatttctccagattcctctaccccccttatatataaagttacattgctaggtttcgctaaattcagtgacatagctttcatttggtcattttttgcttcatcatttgcaactagtattacatttatacctagtgatgttgcccatccatatgcaacctgaccatgtatcaatctgtcatcaattctcatcaaagataccattttccccaaatcctccatcatacattaaaatttttattgtttatactctcatttatctataaaagcaaaaagtatgccaaatactggcatactattttaaatttcatttacttattttgtaatcttgtattttactgtggtagaccatagataatattataaatatatcctatctctgaaattggtatttgcacactataactcttttctagcacactaaatgcattttttattagttttacttcactatgatggtttttgattaacaaatccatatcagtatactcttcaatttcagtttgtctaactaatctttcaatcatacaacttaaatgaacatataaagaaatctttttatcatttggaagttttttcttttgaatattttctatagcattgattccttcttctattctctctattatcttttttgaatctaaaatagttagactgtctattactctaattaatgaaaaattctttacaatagaatcatttatgttctttattttttcattttctactactctactaaatattctaaaaacatcatcttctccttttcctgatattatatcctctaacaatataaaatccaccccattcacatttggattagcagttcctactatagccatcacatcatacatttcaaaaactggttctttatctcccatagaaacaagactatcataatcataaggtattattttgacatcaactatcccaattaaactttcggaaagtagatgttggatttttatagcagtacctatccctgtaaaacaagatgatattatagcatattctttatttttttgaggataatacaattgtatattaggtttagtttcttcatccataatttctgcaatctgttcaatgtttttaccttgcattaataaatttcctacttctagtgcagaaatagtggatatttggtctataaataacattggcccatttatcttattttttaaatcttcatagataagattaagagagcccatatcaaataacacaattaaaccattctttatcctatctccttctaggtatctagacatttgttttgatacatcagcaatggtagcatctataggcatatcaatagctgtaaatatatttttacccaacatccgattacatacattcgccatactactggcagtagcatatccatgtgctataatagtcgcattaacttgattaaatttcattcttataattgttgatttaataaatataatcattatgattgtatctacattattaagatacatatccaatctattcgttattaatgttgatattttacttattatagagtattctttgtaactctctttttttaaatatattagtaatttactttctaaagctttatactcatcagataattgataagattcgtccttcaaataaagataagacgaaaatgccaatacattattcccatcgtattttatattgttattaacttctaaatttctaaatatatcctgcattatcgatattataagctccataagtacgttattattttcatcattatttgaaaagactaaattgtccattagtctaatcattagattagaactctttttactaaatatttcttttgttatttcatttttttctagtctatcaaagtagtctaaacattttatgaaactttgatagattatatttcttttatttcttccatttgacatttcaatactaaattgtttaggagaaaagataatgcttttgcttttaccactttggaattgaaatatatctacattttctatataaagatttctagggaggtcttgaagagtaacaaaaatatttccatttcttctttgattttttgcataagctcgtccacatgcatattttattacatttttacattcacctatattccccttgaattttatctttaaaatcgtatttaatgtaatttgagttatctctataggcaagccaagtaccttactttcttcataaataaaatgttctacaatctttcttttttcaatagtccctctttcttctatattgggaacataaatatttatgggtattcttcttaaaaaagtttgcaaaaatttggatagactttctgttgttgcaaatattaatcttaccctagcttttctaattactccattctctccaatcctagaaaacgtacctgtatccataaatgtaaataacttttcctgaccttcactatttaatctatgtacttcatctaaaaataaaacaccaccatctgattgttctattagacctgctctagattcatttgctccagtatatgctccttttacatgcccaaataatagactagacaataactccaaattattataatactgcgcacagtttaacacattgtatggagaatttttttctaatacattactgcttacactatatttgtatattatcttggctaaaaaagtttttcctactccactttcacctgtcagcattattgtaagtccgccatttggataaagtacagcggtttttatttgttcgattacttcttttaagctattatcatatcctatgatactattaaacacagtctcttgctttaataatttacactcatttttaagttcatctaaattttcataaatacttttttttgtaggtcctactacatcatttattttatttttaggtaaaaaaataacaggtctactgtttatctttataagattatcagattttactaaatcatttaataatctacttgattgagttctacttaaattaaacttttttactatatcttctgttattatgccactttcttttttaagttcatcaaagttgttaaataatacacattcatttacaaaacttaaaatttcatccctcatgttcaacctccaatacaaatatcaataatactataatattagtatatcatttatatatttatgaaaaagataattatattcctatcttgattctcttttgtaaggttgtaaaatcaaactttttataagtataaaatctagattttttaacataatctcaaggttcttatctttccatatatctgacatagaatttatataagaatatatttattgtatttattataataaaaagtaaaacattataggtattttaaaacttattagcgaagaaaatatttgtaacttttattaccttatgaatattatttcaaatttaaaaaggctataaataaatttatttttaaataaatctacttataacctcacaataatacttataaattttattttttcacaatgatatatctcaaatatagttaaaaatatatctatttaattattaatatttaagtaataaattctcactcaatcattaaattcctttttatagtaaattactcttattttacttataccaaatacatttatgtatagatataaataagtactaaaaaaacaattcaagaaaccatatagtaaacttaattacatctgttatttgctcatatctttagacttatctatacaagcaacaatagattttataactgctgctctaaagccttcttcttctaataccttaacagcttctatagtagttcctgctggagaacaaaccatatcttttaattcacctggatgttttccagtttcaagaaccatcttagctgaccccattactgcttgagatgcaaatttataagcttgttgtcttggcattccagctaatactgctgcatctgccatagcttctataaacataaatacatatgcaggagaagaaccactaatacctgtaactgtatccattaaatattctgatactatttctgcctcaccaaaagattcaaacagagccttaatcatatttaactcttcatctgttacattactatttttacaaagagctgacattccctcgccaacaagggctggagtattaggcattactcttactatttttttatctgaacctataaaactttccagactttctatagttttacctgctgctatagatactattattttatttgcatctattaattctttaagtggagttaaagccttttcgcatatattaggtttaagtgctactattaccacatcagaatttgtaacagctacctttgaatcagttgtagtatttattccaaattcttcttttactttatctaaggcaacttggcttaaatctgatacagttatatcttctgcctttactaatcctgactgtactatgccacctatcattgcacttcccatattccctgaaccaataaatcctaaagttttcatatcaaatctccttttttctattagttttattttaaagtagctaaattgactttattttaactgcttaaaattatcttatttttataaaatataaccttattataactataataaattattcttttgtatgtattacttactaatatgtgtatgatttactaaatataaatttaacgattttttcattaaacttaacgagctaacttcctatttagaaagttagctcataattaatctaaaattttaaaaatggaatcaaaccatttatactttattatatcagttacgattttatatagtaagaagttttatttacaagcaaacctagaatgtttgctcagttcttcctattatctcatcttgtagtgttctacttaaattattgaaatggtcactatatcctgcaactctaactattaagtctttataatccttaggattcttttgagcctctaacagtacatttttatcaaatacattaaattgtatatgatgaccatccatattaaagtatgctcttactagattagccatattatctaaccctttttctccttgaactactgatggtgcaaatctttgatttaataatgttccaccagtttttatgtggtccatcttagcacaagattttataactgctgtaggtccattagtatctccacctttttcaggtgaaattccctctgaaactggttttgcacaaagtctaccatttggacttgctcccataatttctccaaagtatatatgacaagttgttggtaacatatctactctgtattctccaccacaaacagttagtctaccagttacctcattgtaatatgcattgaatatctcttgcattatttcatcagcataatcatcatcatttccatatttaggagtcttatttgaaactaaattaagtatagcttcatatccttcaaaattagcatcaagtgctttaagcaatgtatccatatcgaattttttcttatcaaatacattatattttattgctgttaaactatctgttatagttcctataccaacaccttgtatatatctagtgttgtatcttgctccacctctttggtaatccttgcctttttctatacaatcatcaactattgtagacataagtggacaaggcatgtgttttgcacatatattttctatcacagcatttccttctatttttatgtcaatcatataatgtaattgctttttaaatgcttcaaatagttcctcataagattggaaatttctagggtctccagtttcaatacctatttgttttttactaattgggtcatatccattatttaatgttaattcaagtatttttggaatgttcatatatccagttagaacatatgcttctttaccaaaacatccagtttcaacacaaccactggttccaccaagtcttgcatcttctatagtttttccagcttccataagctcttgaactattgcttcagtattataaaatgctggttgaccccatccttttcttgatatttcacaagctctctttaagaatttttgaggagtctttttacttatttgaacatttgaactaggttgtatcaatttcatttcatccataacatcaagtattatataactaacttcattaacaccatcttgaccatctggatttattccaccagtgtttatatttgcaaaatctgtatatgtgctactttcttttaatgttataccaacttttggtggtgctggctgattgttaaatttaacccataaacattcaagtaattcttgtgctctatctctatctagtattccattttctacatctctttcatagaaaggatttagatgttggtcaagtcttcctggagtaaaagcatcccatatattaagttcagtagtaacccctatatgaacaaaccaatacatttgtatagcttgatgataagtttctggtttgtgagctggtacaacatcacaagtttcagcaattagtaataaatcttttttcttagcttcatctgtttcttcttctgccatttgtcttgctttctcagcatatcttttacctaatataaccattgcatcacaagctattgccatagcttctaaatctgcttttttattatatgcatctaaatcattaagaaaatctagctcttttaatcttgcttctatgtctttctttaaatctaaaaatccttttttatatattgtatctccacaaactgtatgtcctggggctctttgttccataaactctgtaaacatacctgcttcatatgctgctaaccactcaggtgtcattgcatttattatcttatctcttgtttgtctttttttccaaaaaggaattatttcttctttatgtatttttctagcttcttctgatacgctaaaatttattatatctctattgtgcattacttctaaatcttccattgtgtgacaacaaatttctggatatgttggtgctccattaggagaatcacctttttcacctactattaattctccatcatttatgctaagagttctattctcaatataatgcttaaatgataaagcacgaagtacaggaatctctacacttccctcatattttttataagcttctgtcataagtactgctctttcaatagatatgtgtggttctgcattaatactttcttctcttaattttttagttctctcaaaagttcctcttgccattttattaccctccaatcttagtattgaaattacttgcttcaaacagtctttttatttcctctaatttttcttctgatggtctttgtagttcttctccttcatactttttataaattttatcatacttgtgtttaccaatattatgatatggaagaagacttactgcttgtatattcaaaggctttaaaaactctatcatttttttaacctctaaattttcatcatctacatttactcctacaattaatggtattcttatatttatgttaacccctaattcacttaaaatcttaacatttttcagtattaagtcatttgattttcctgtaaattttatgtgcttatcctcatcaataagcttaatatcatataaaaacaaatctgcacatttagcaactctttcataattttctgactttgcatagccacatgtatcaattgctacatggattccctttgatttgcacatgtttattactccacaaatgaagtccatatcttgagccattacttctccacctgatagtgttactccaccacccgattcttcatagaaaattctatccttctctatctctttaaccaagtctcttacagaatactcttgaccaacaatctctcttgcattgtttacacaatagtctaagcaagtttcacaaaactcacacttatcttggtctaagcatatttttgtttcacctttgtaaattgccttatgagggcatatatttatacatgcttcacattttgaacatctttcttcattatacaaaacttgttttgtatatgtttgactctctggattatgacaccaaacacattcaagtggacaccctttaaaaaatactgtacttcttatccctggtccatcatgtatgctacatttttgtaagtttataactaatggattcatgatttttcacccctaaataatatccattccattttttcatttttatgcaattcatcttcatagaatatacctatgaaaagcatttctacaattacataatactatatttgttattattttgtctatatatttttagtaatattaaaaaattttattttattatgatatttatattgtttttgtaaattaaatttaaatatttattaaatttatttttataagaaaatatagcaataaactataaacaatacatcattttaattaatttagatgtatatactataaaaattaaataaaaatagagactacactttaccatgtagtctccttctttctggtcatatttagaaattcacatttattgttactgcttttccgcctctatttactgttatttttgtactagcaccttttgagaaagtatacaactttttatttaaatcattcatacctgttatatctgtatctcctactttagttataatatcccctacctttactccagctttttctgctgatgaaccagatattacttctgcaacataaacacctttatcagtacttaattttgtacctgttgctgcttcataatttgatacatctgtaccttttatgcctaaagttactttttcatattttccatttttgattacttcttcaactatactcttagctgtattgattggtattgcaaatcctaatccttctgcttgagaagcttttgctgtgtttataccaattacttgacctttttgatttaacaatggtcctccactatttcctgcatttatacttgcatcagtttgtaataaaccagtcatattagttttttctgtttgtatagttctatctaatccacttattatcccttgagtaactgttttttgaaaatctaatccaagaggattacctattgctattgatatatctccaacttttactttgtcactatcagcaaattctgctggtgttagtccagttttatcaaccttaactatagctaaatcaagttgttggtcaaaccatactactttacctgaagttgttgaaccatcattgaataatacatttacacttgtagcttgaccatctgatataacatgagaattagtaagtatatatccatttgaatcaactatgattccagttcctacaccttgtgtttcagttggtattgcaaacatattactagtatcaacactagttgttgtaatacctacaacagatggcgtagctttttctgcaactgcttgataaatattttgactcttaccatcatcatttacaactatcggcgtagaacttcctgtagatttgcttactaaattgtccttaactaaaattattgttagaaaactactaagtattgaacttattatagcaactaatattactaaacttatccctttctttcttcttgacatctcataccactccctatcttaatataatataaattatcaaaatatatttttcccaatttttcataaaaaaaatgaaatcatctattttgagtaaactccttttcgatgatttcattatattattttaatcttaattaaaccttaactatttaaaattatttaagtcttttttctagctcttccttttctttttcataacctggtttgcctagtaaagcaaacatatttttcttgtaagcttctactcctggttggtcaaatggattaactcccaataaatatccacttattccacaagccttctcaaagaaataaactaaatatccaaaattatactcatctagttgaggtatatttattactaaattaggtacttttccatctgtatgagccaatagagttccttcaaaagctttatgatttacaaaatctacagtcttacctgctaaataatttaaaccatctaagtctacttcctctgaacttatagttatatttctcttacagttttcaacattaagtactgtctcaaataaaagcctttttccatcttgtatgtattgacccatagaatgtaaatctgttgagaaatctacagaagcagggaataaacctttattttcttttccttcactttctccataaagctgtttccaccactcacttacataatgtagttgaggttcatagttcactaataactctacatcttttccttttctatgtaaaattgttctagcaacagcatatctataactatcattactttttaagtcaggattttgaaatgcttctctagcatcatttgcgcctttcatcatagcatcaatatcaagtccagcagcagcaataggaagtaacccaactgctgtcaatacagaaaaacgaccacctacatcatctggtattacaaaagtctcatatccttcttctgtagctaactgtctaagtgcacctttacttgcatctgttgttgcataaattctctttcttgcttcttccttaccatactttttctctaagtaatctttaaatattctaaaagccagagctggttctgtagtagttcctgatttagatattacatttacagaaatatcctttccttcaattatatctaataaatccataatatatgttgagcttatattatgccctacaaaatatacttctggagcctttctttgctcttttttaagtccattcctaaaagaatgacttaccatatctatagcagctctcgaacctaaataagagcctcctatacctattaccagaagaacatctgagtctgattttatcttctcagcagatttttttattctgtcaaactcttctttatcataatttttaggaaggtctatccatcctaaaaaagtatttcctaaaccagttttattatgtaacatgtcgtgcgcaacatctacatatggttgcatgacatctatttcgttttgacaaaaaaactctgtagctttactataatcaaaatttatttttcccatttaaatccctcttttcagcatattcgttttaaagagattataacacaaaatataggtgttttttttaaaagtttgccacaaaatcatacatatctcatcatttattatcaggaaatcgattcttctaaatactataactatgtataaatttaaaaattttagtcaaataaatttacaaaaaaagaaactctaaacgtatcatttaaagtttctcttttatttatcctctattttaaattttatattattttaaattaattatttttaatcatttcctaatctcttcgctataacttgttgtgctatattgacagcatggtcagatattctctctaaattacttattacgtctaaataaataactccattttctatactacatagattattgttcaatctatacatgtgattagctctacaagatttctccattatatcaacttgttcttcaatttttataaccttacaagctaaatcaacattatcagttctcattgattctaatgcataagtatatgctgaaacaactctattatacataacatcaagttcagattgtccttcttctgagaaagaaatatttgaatctattgcaacttgcgataattcagctatatttttagcgtggtcaccaattctttctatatcattgactgtattaaacaaagtatccacaacttctcttgaatcatcatctaaaggtgcttttgaaagtttaagtaagtaatttaaaatagctttctgtaaatcattgattaatctctctcgtctatatgtcttagctattttttcagttgaatgttctactaaggcttccatagatgcatttaggctttccttcgccttctcacccatacgaagtgcttcttttatcgtatttgcaagagctatagaaggagtttctatcattctatcatctatatatttaatagttttagtttcatcttcatctatatcacctgctctatcaggaacaagctttatagctagttttataataagatttgtaaatggtaaaagtatcaatacagatattatattaaacaatgtatgtgtattggctatttgtcttgcaacattgcttggatcccaacttgtaaccatgcttactactggtttattcaagaatattaagaatatcaccgttcctaaaacattgaagattagatgcatcatagctgctcttcgtgcatttttgttagcaccaatacttgataacagtgaagttacacatgtaccaatattttggccataaagaattggcagtgctgctgataatggcactagaccttctgctgccagtgcaaccaacatacccatagatgcacttgaactttgtattattgctgtaatcccaaatcccaataataatccaagtagtggatatctaccaaatgtaacaagtaggtcagtaaatccttgatagtctcttagtggctccactgccatcttcataaaatccatacctgtaaataatataccaaaacctataagtatttcggctatattttttattctaggcttatttccaaataaataaagtataatacctacacctaatgctactggggccataccagttaagtcgaaagataccaattgggctgtaacagtagtccctatattagcacccattataactcctattgcctgttttaaagtcattattcctgcatttacgaaaccaacaaccattacagtagtagcacttgaactttgtattactgctgtaactcctgtacctaccaaaactcccataaataggttactagtaagtagttttattatcttttttagctttgtcccagcagatttttgaagaccttctcccataaggttcataccatataagaacagacctaatccacccattagacttattataatgttcaaattatttcctccttgtaaagagattactgtatctaaaaattttataacctattgtattttatcaaattataggagtgataatgttaaattcatgttaaatattaaaaaatcattaagtttatgttaaatttttgtattattggtgtatttttgtattattttttctgcacattttataccatcaactgctgctgtaactataccacctgcatatccagcgccttcaccacatggatatagattcttaatactcactgattctaaagtattttcatctcttactattcttattggtgatgatgacctagtttctactcccgtcaaaacagcatcatacattgcaaacccattcaattttttatcaagagatataaacgcttctctcatagtctctgttacgaagctaggcaaacattcacttaaatttgtaagtgtatatcctggtctatatgatggctcaacacttcctaaattcaaagaagtcttattgtttataaaatctccaacaagctgaactggtgcattgtaattttttccacctaattcaaaagctaatttttcatacttctgctggaaatgaacacctgctagtggattatcactcttaaaatcttctggcgttacatttactaaaaatgcactatttgcatttattttatctcttgcatgttcactcataccatttgtaactatttcaaaatcatttgatgcagatgctatgacactacctcctggacacatacaaaaagtatatgctgttcttccatttgaaacatgctctataagtctataatctgcagctcctaacctaggatgattataaaaatccttgtactgtgctttatttattaaatcttgtggatgttcaactctagctcctattgcaaaaggtttttgaactatttttatacctcttgaatacaacatttcataagtatctcttgcactatgtccaacagctagtataattgtatctgtatctattttttcagtatcatttattattacagattgtatagaatcatttgatacaactatatctgttacttttgaattaaatctaacttgaccacctaaacttattatttcatttcttatatttttaactacattttttaatatatctgttccaacatgtggcttatgtgagtataatatttcatctggtgctccaaactgaactaactcttctaatacttttctacatcgtatatcttttattctagttgtaagtttaccatccgaaaaagttcctgctccaccttctccaaattgaacgtttgaattattttttaattttctagttgtccaaaaatcacttatatctttggttctactgtctacatcaagacctctttcaagtatgattggttcataacccatttgagctaaaagcagacctgcaaataaaccagctggtccactaccaattaccaaaggattattctttaattttttatcacccacaggtacatttatgtatctgatttcctttatttttgttacatcttttatttttgagttaagtattttattttcatctttgacttctacatctacagaataaacaaattccatttttcctttttttctagcatctatagattctttatatatactatatttgactaagtttttttcttttatttttagcttcttaagtacaacatcttttaataaagatatatctttatcaattccaagttttacattagatactcttaacatattgttttcctctcttagattgtaatataaaaaagctagggttattcctagctttctacaaatataacttctatattctcttttactagattttctacccaaatctcatctagcacaaaattctttattttgtttacaacaagtgttttatctaaatcctttttcaagttttttactaagaccattgcttcaactgatttatgcaatctttcaacatacagagaattaactttaatcaatacaacccttaattcacacacatataacttttcactacctaaggtgatttcatcatcatattcatatacactaaattcatatgtattttcataaggtgttatattttctattcctatatagtccatttatttatccttttttagttataagacctcttataaccttcatgttattaaacaccttttctaagaagttctctgcttcttcattgtctaaaaggtttatttcaaggttttcgttttctacaatacctttagatttacagtactctttagcaacatttattagttcattttttttatccatagataaatcaaactctttatagtctattattatatattgtttggtatcaggtgatacaccattattatatcctatttctatatgataaataactgcatatatttcttctccgttgtacacaggtacagctgggttagattttataaagttcgttgatacagcaattgcatttcctaaactaagactcattattaatacctctttctaaacattatacatatattatactatagattctttatctatgacttaaagctttttataattaattaagatatttttaaatctttgtatctctttcctagtgtactagagcttatatcgtatttctttgatatttgaacttgagttataggttgtcctgcttcttttttaacatagtattcaacagcagctgcccaaccattttcagctccttttatattttcatgatttttcttatattcattccaaaactctatacatgcatctatattttctttttctacattttctttaagagtatctaaaactttacattcttcttcagctaattcattttctgaattaacttttgtatcgtttttatctctttctctctttaaatattcagctatacttgggtctaaaagctgttgtatatacttgtatagtatatgtgtatgataaattaagaacgacttcatatctttgtatacatcttgatattgattgaatagattcataatatcctttaaaattatatctttaacctcatttgatatacttatagttatatctatcaatatgttagttccttcaatatcaactattctagctatcatacaacttccgattttaaaacttctcagaagttttacatcttctgtacaaagttcatttccacttaaacagtcctttaatactatttttccagcagaaacttcttttacctcataaatacttacgtatgattcaaacatactttttaatattgatacttctgattgacttaggtttgcaccattttcttcaagaaaaccaactgtcataacctttttattttccattatgtggtcttgtattaaataagtattaaaaaatctttcaaatttttcatttacactatcattttgcattatataaaacatttctttagctttttcacattcttctttaaacttatcctgtcttgaataatcatataactttgaatataaatctgtatattgtttttgtgaaagttcagtttttctgcatgctctttctgaaacaatatctttatttaaacaacatttcttgtattttttgccacttccacaagggcatagctcatttctccctaacaatatgacttccactcccttattattaaattaaagtacaatttgttattataccatttttttattaatcaatctatagtataagtaaatattctattaaattcacttatattttggtacaatatattaactttaattaggatttcgataaaatcatcaacaatccctcttgtagaaatgaattatcgtaaaactaattcctctataaaattttattaattgataatagttttttactttatctattcttttttgttatatgactctaactgtcattttacattcaacaatattgtctttttcttgtttatattcatttggaatattttgaacatcaaaattattgacttttaatttgttaatttctatcttttcaagtttattatttagtcttaacttcttcattacaccttcaagtttcaacacatttgcaagttctccattaacttttatttctaaattaacttgttttttattgtgattatctaaactactttcttgattaatatattctacattcacaatatctctcagttcattttctactaataacactatatctttatttgtttttttatctaaaaatgagttattaaaattatttttcaattcttcatttttatttaattcaacactttctatatatttatcatctatatgcttattatcctttatttgataattatcttgattatttattttatttattatattttgcttttcattcttcaaactagttaggttttcttccaaataacttactgctatatcacttgccaatataataactaatattaacaatattttaagtagatttttttctctattatttaatctcaaaaataatcacctatctaactttttattctaaatctataatattctccatctcttacaatactgtctatgtaataatattttatgtactttattttccttaggttgtttaaaacatctaaatcactacacacaccttccatctctagcttatttttatctatcgatattttagtaatactatttattccaattgtttcatatattttttttatttcattaagttttattttagaaaatttctctctagttttatctgttgttggtaaagtgtgctttgatttatccactagcttattttgatttatataatcttcaagttcatttatagatttcacatacataaatgatttaaataaaatacacgttaaaattaagactattattattttatagattttattacatggtttagtttttttaaatccattaagaaaatttattgttttatccactttcacttaaataatcattcctatactatttatataatttatcctattgtcttctaaatctgcatcaaaattattttctacttttactttatcttttaatcttaatggatttacttcaatagatttatctgtatatttaaagtattcttcaataaaacaattttctataccatagtaataaacatacttaaaatcccttaataatctttttatgaactcatatgattttccctcttttgatagcaagtatgtttctcttatttttttatcttttgttatatttataattaactgactttttttacattctataaataccccttcttctgaaaaattctctattaaatttaagtttataagcttttgtaatatatcaaaatttatatttatagtctttggattcatatttagattttctgaaatgttcttaattaattgaataatactctttgggaaaagaattacttgtatattcaatttatcatttttagaatttataactttatattttattgaatagttatttatgtttattggaatgtattgtgttatttcaaattcaatcatgcttaatatgtctctttttttcttagtatttagaacttcaacatttctaatgactatatcttgaatttgaatgttaaagtataaatttttatataatatttttgatttaccaatctcctcttttacaaatctaactacatcttctatatatttaatcttctcaatcgaattactatcattttttatatcaaagttaatctcttttataattgatttatctataaaaacttttttatgactttttcttaaaaatacaagccttatataatcatcatttatttctaagtttagaatttttttaattatagccatctccttcttaaataaaaataattttaaaacttacagcaatcaatataaaatattattttggataaaattgtttagaatttatatttacgcttatatctgttccgctatcatttatgacaagttcgaatttacctgatgtactctgaggaactggaacagtatttaggtatcccttttccttcaatgtttctacacttagagagtctattgtcttttcatcatcattaattgccatgctagctgcagttactatattagcagcattcgtatagtctgcatttaatttggcactttcttgaaccttactatacttaactaatgctatactagatataacgcctaaaatagttactactacaatcatttcaacaagtgtaaatccttttcgttttttatttatcaaatttatcaattaaatattctctccttttcaaaagtttcatctaataaaatttatttttctctctaaaaattagtaattgcatcaaacataggaacaaccattgctaaaataaaagtgccaataattaatcccataaatacaattagcataggttctataaatttcattatttgctctattttgttatttaattcattttcataaaatttatttattacatttagacttttatctagtttcccactttcttctcctgtatttgccattgaaataaataattttggaaaaacatttgctaaattcaaagatttacctatgctatttcctttttttatataattattagaaatctttaacctttcataaataaattcgttgtctataacactagctgacatgtctatagcttccacaatttgtattccactgctaattaaaacggacaatgcccttgaaaatcttgttgtagctactaactgattaattttttttataaaaggtattttgaattttaacgaattaatcaatttttttatattatcatttgttataaagaaataaatgcttcctattgaaaacaatataaaactaaatattatataagctaagttatttgtaaccactgtagatattcccattaaaactctagttattaaaggtggttcaattccattgttggtaaaaaccacctgaaaattaggtattacaaatacgaatataaacaacattgataagatagataatattataagtattattggatatattgaaatagttattattttcatttttaatttgtattctttatcataataattagataaatcactcattattatatctaagtttccactagtttctcctgcttttatcatacttataaagaatttagaaaatatacctgttatttgaaatgattctgctattgagttacctttttgaatatgatttgatactatactaagcaaattctttacttttttacttgactgactctcaatgatttcaaatatttttgtaatttcacatccagattccagcaatatgcctatctctttgcaaattactctaatttctttatcactgattctatttaatactaaataaaacttttctaaattataaaatatatttttagataatctcatgtactataataccttccaaattatattaattacaattaaataaacttaatattttctaatttaatgcatttaattttatttcacttaaatataatttatactcaaacatcttaattaaaatagattaaataaagacaactgaccaaacgaagtttaactatacaattcagttaaatcatttcatttactactaaacactcttctaatgtcgttattttttcatttattagtcttttacagctatcttcaaatgttatcattccattattttgtgccacatctttaatagtactagaatcctccatatttcttatacatgtctttatatcatcattaatttctaagatttcataaattgctgttcttccaaagtatcctttatcattacatttttcacaccctacagctaccttagtatttacatctccactaaaattatcttttatcataatctcatggctacaatgattacaaacttttctaaccaacttttgagatataacacctataagagaggcatttaaaagatatggtggtatttgcatttctagtaatctagctatggaagatactgcatcattagtatgtaaagtacttataactaaatgacctgttatagctgctcttactgctatcttagctgtttctgcatctcttatttctccgaccattattatatctgggtcttgtcttaatatcgctctaagacctacatcaaagctcaaccctacttttgaatttacttgaatctgacttatgccatccatcttatactctacaggattttctatagtcataatatttttatttattccttttaaatcatttaataaggaatatactgttgtagtctttccactacctgtaggacctgtcactaataatactcctgctcttttatttattatacgatttatagattttatagcttcctctgaaaaaccaagttctaatttgtcttttaaaaaagtatctctattaagtatcctcaaaactattttttcaccatagacagttggtattgatgaaactctaatgtcaattaaatttccacctaactttatatccaccctaccatcctgaggaagccttttttctgttatatccattgatgcctttaattttataaccgtagacaatgatggatagacatcaactaaaaactttgatacttcctttagttctccatctaccctcattctcactattaaatgttctttaaatggttctatatgtatatcacttgcattttcttttatagctttttctaaaagattttcaaataatttttttgcataatcctcatcaagttcaaagctattataatatttttcaatcttttcacttataagttcttttttctccttcttcaatataatttctttacctgtagctaatctcaagtcctgtagagcataaatatcctcatcttctatttctacaactaaattatcatcttgaaactcaactggaaatacattatatttctttgcaagtttttctggtattaacattggcaaactgctttcctctaatataatattaatcaccctttatatactttaatttattaggtatattcatttttttcatagagatattttcttcagtttttatgcttattttcattggataattggtttgtatgctatctaaatatttactacctttatctacataattagataatttctccttatctccaatgcactttatttcatatggttgtgctacaggaactccatttatatttatatggcttcctgcaagtacaacttctgaatattgattaattctttgaccatttatttctatgtattttcctccgtttacttttaattcatttataacttttacaagaatcttattatagtctatactattagctatattccctgttttttcatctatagcatctatacttaatattatcccactaccctttacatctgaatatgatagactatctctaagtgtttctatttctgatatttcttcagaatttttttgattttgtttcattgaattaatttctttatctaacttgtctttctctttggttaattcttttatagattttcttgtcatttttatttcttttcttattgacttgtctttgcttgtataaactgtttcttcattgctataatctctaaatatggttccaacaagtatacctaaaatagtacttgctagtattataaacacatattgttttttcatactgtattgctccttacaaatttatttttatatgataattttctttaattaaatattaaacatttacatatgcttattatatcaaagttatatattaaaattcatctttagtatataatatcatacattgaactcctatcactaatttaccaatatcaagtatgcatttttagatgttcttaaaattatataaactttcaataaacattgttgtgatattataaaaaaacataaattaggaaaggaaataataattatgaaaaacaaataatggctttggagattattaatatcattttttagcaaaaaaaagtaaaatggcatagcctcaaagctacaccaatttactaaaaattatattattattaacattaattttaaacatatacgtttataagttttcctcatattttaaaattcttttaattaacttatctcttaatttccctacttcatcaaatctcatattaggactatagtaactttctataatatcatgtttagacttggctctcttaagatttagtactgcccaacaaattaaatcatctaaaactttttcatcaaatttaatatcttcttcatatttaagtagtttttctctatttaaaaactgatttaaatcaattgtatcttcttctttaaaagtcgtacttatagttatgcctatatctaaatcagttaatagtacagtttcaattttctctggaataagtggataatgataaacttctacatttaaacctttttcagtagctttcttatatactttgtttaataatgtagttttcccagttcctatttctccatctaaataatagactttctttacatcttttaaaatgttttctgtataatctaaacaccctacaggagttatagctgaaccaaataaatgcttttctctttttagatttcctgtgcttttaactccatcaaataacctttttataaattcttctgtgaccaaatttactttgccataatccatacaatcagaatatttttcttctatgtctctaaaaattggttctgctgactttaaaaacttaaatgctcttttaaatgaattactaatatctttatcataaactgatatttcttgtttattcttttctaattcttctgtattccagtaatcacctaaattaattatctcatccaaagctccaggtagctttgggtccatagtatgtggggcagttgcatccataagtaccacgcctaatttctttataactaaaccatccaacgaacttgggtcagaaggacaatgatataaatcaatatcatatcctctatgcaaaaactctttataaatttttttcataagtgaggattttcctactccaggtccaccctttaaacaaaaaactctttttacattttcaggaattatatagtcaaaaaaagaatatgagccttgtgatgtatttccacctgggaatgccttctttacctttccttccatattagcgcctcctcataatttacaatatctcttaattaagatattcatattataagaattttattacagctttctgattttgacaaatttaaaacttaccatctaatactaataacatattaattttatctaattattatagattctcatactgtaccttattctatctataaatacaatttaagtgtccatattgaaatatttgtattgtaatacagctggatattacttaaatccaattgtttccattataattttatgttaaaataatattacaaaatacatctgtttttcttcataaacgggtgaaattccctatcggcggtaaaagcccgcgagccttatggcataatttggtcatattccaaagccgacagtaaaatctggatggtagaagaaaatagtatatgagtacctttatgtaattttacatgagtaatctatacaaatccttcaactaccgtatttattcatgaaattagacacattcaaggtacctaatatacaggtgctttttttgttgtttattttacaattatatcgtacttataaaatctattaagattggagtgttatcatgaaacaaaaatggatagtattgattatcatctgtattggtgtatttatgtctactcttgatggaagtatactaaatatcgcaaatcctacaattgctgctgactttaaaattaacatgtcacaaattcagtgggttgtaacagcttatatgcttgttgtaacagctactatgttatttttcggaaaacttggtgataaagtaggttcaaatcgtctatacgcattaggattttttatatttacaataggttcttttctgtgtagtatgtcaaacaatttatcaacattaatttcttcaagaatctttcaggcagttggagcaagtattttaatggctactgggcttggtatagtttccaatgcatttccagcaaatgaaaaaggaaaagctataggaatcactggagctgtagttggtataggaaatatgagtggtcctgtaattggaggtataattttagaacattttggatggccttctatttttattatcaatatacctattggtattatagcagtctttcttggcattaaatttctgcctaaacctgttttggatgaacaaaacaagagctttgatatttcaggtcttctacttttcgcatcttgcactacgcttatattacttgcaatgaatgagaagggtaatacaagattgtatttaggtataacagcacttataatcttcttattgttggcattaagagaagtaaaatttgaacaaagctttattgacctacctctatttaaaaatagaaactttactgtaggcaatatcattggagtagcttgttattttcctcaaatggcagtatcttttctacttccattttatttagaacaattaaaaaatttatctcctatgatggctggttatgtaatgactgtacatccacttattatggtacttatagcacctattgcaggttcactttctgataaacacggtgcaaaaaacattctaacagcatctttttcatttatgaccatctcactagttggaatggcacttttaaaagcagattctccattgtatcttttaattgtatgtttagttatttttggacttgggctaggagcatttagttcaccaaacaatagtagtattttagcagatgttcctcctcaaaaacaggggtacggaggcagttttcttgcaactattcgtaatttatcatttgctcttggaacagcattttttagtagtttttttgcacaaagtcttacatacaatcaaaagtttaaaagtcacacatcagcctatgttatagctagcaatcagtcttattggattgcagcatcagtatgttttatagggcttatactaactgttttctttatgagaaaaacagataaatctatttcttaaatgctatttattgctgactacataagtcaataattttttagttgaactaatttatactaattttcccataccttactaaaatttattagtatttagcaaaattactgatatttattgtttataaacaataaggatgccaaaaaaagttcattaaaactattttaaggcatcctatattttgctttaatattaatataattaaaactaactattattacatttattattcaaataaatcttatgtcaatatttaacattttaaatttaatctactgttatttcatatccatgttgattgtattgatttacaatctcttcccataattcttcaacaccagtcttttttagtgaagaaacaggaattactttttcactactttccatttgcaatttttttcttattatacttatgtgtttttgatattgtcctctagatattttatctgccttagttgcaataactacacagttatatccaaagtgctttatccattcatacataagcttatcatctgctgtaggctcatgtctaatatctacaagtaggaatatagaacataactcttgtctactttctagatatctttccattatacctccccacttttctttttcagacttagctatctttgcatatccatagcctggaaggtctacaaaataaaattcattatttattagataaaaatttatagttctagtttttcctggtgtttgactggttctagcgaagtttcttctgttaagcaatgtatttattattgatgattttccaacatttgacctaccagccaatgctatctctgggattccttctgctggatactgtgatttattcacagcactcatagttatctctgaacttctaattttcattattttcaccactctttaataaagcttgttctaatacttcatccatatgttctacaagcacaaactccattttttcttttacattttctggtatttcatctaaatcagcttcacattctttaggaattaatacttttgttataccagctctatgagctgctaataacttttctttaacccctcctactgctaagactctacctcttaaagttatctctcctgtcattgctatatttccaggaacaggtcttttagtaagtgctgagattactgcaagagccatagttataccagctgatggtccatcttttggaacagcgccttctggaatgtgtatatgaatatcattcgtcttataaaattcagggtctatatcaaacttgtccactattgaccttatataagagatacctgtcttcgcagattccttcataacatctcctaattttccagttaatacaatttctcctttacctttaagtacgtttacttctacttcaagtgtaactccaccaactgctgtccatgcaagaccatttactaatcctatttgaggattaacttctgcaagttgatacttaaacatgtcttttccaagatatgtctctaggtcagacttatttataacaacctcttcaagagttgggtcttcaacgtattttttggcaacctttctacaaatcttaccaatagttctttctagtgttcttacaccagcttctcttgtataatggttaattatacttcttaaagtttcatcatctatttttataaagttttcttttaaagcatgttctttaatctgttttggaagtaggtattttcttgctatatttaatttttcttcttctatatacccagatacttctattacttccattctatctaataatggtcttggtatattacctagactatttgctgttgtaacaaatagtatttttgataaatcaaaaggtatttctaagtaatggtccacaaagtccttattttgctctgggtctaatacttctaacattgctgaagctgggtcacctttataatctgctgccatcttatctatctcatcaaataagaatacaggattttttgtttgggcttcttttaccccattaattattcttcctggaattgaacctacataagttcttctatgacctcttatttctgcttcatctctaactccacccaaagatattcttacaaattttctatttaatgctctggcgattgattttactatagatgtctttcctgttcctggaggaccaactagacatattataggccctttaagtgacttagcaagagttcttatagctagatactctagtattctctccttaactttttctaatccataatggtcttcatctaatatatcttttgccttagttatatctaatttatcttttgtctctttattccatggcaatgagaatatagtatctaaatagtttctacttacagatacatctggagacatagaagatatttttgaaaatttatctatctctttttctattttttctttggttgtcttaggtgcttttatttttttaagcttttctctatactcatctgcttcagaatttatatcttcttcttcacctaattctttctgtatagcttttaattgttctctaagataatattctttttgaaccttattcatctgtttttttactcttaaagttattttcttttctatttttaatatatctatttcctctaataatatagaataaataagttcaagtctttttctaatatcaaattcttctaatatttcttgtttttggcttgattttagatatatgtttgcagctatcgtatctataaatctatctacatcttctatatcagctagagatattaatatttctggtgataccctatttccaatatttatatactcttcaaaggcatcaaatacatttcttacaaatgcttcaatttcaacttctgtttcactatccaaattatcactattaaatactatttcttctattactgctctgaaatacccatcttcttgttctattttctttactctaccccttgatacaccttcaaccaaaacacgaactgtatctcctggtaattttatcatttgcttaactttacagattgttcccacatgataaaaatcctcttctcctggctcatctacctctgcttctttctgagaagttaaaaatataagttcttcatccatcatagcttggtctaaagctttaagagatatctctctacctatatcaaaatttaatatcatatatggaaatatagctaatcctcttagaggaattaatggtaattcatgatctattttagtataattttgttccatcaacattactccttttctagtctaattgctttgcttttaatattatatatttgaacaagttaattttcaacattaatgataaattcttagaatactatcatactatattatctttttattatgatataatattaatattagtatacttagatgttatttatcttttggaggtttctattatgttgaaattgtttttaacctttttaaaaattggtgcgtttacatttggtggtggatacgctatggttcctcttatacaagatgaacttgtaaacaaacaaaaacttttagagcaggaagaatttattgattatttatccatagctcaaagttatcctggagtactggcagttaatatatctgtattattaggatataaactttatggtataccaggagttcttatatgtaccttaggctctgctttaccatcattttgtatagtcttagtcttatcgtatctatactttaaaaattcatcatctaaaattttagatggattttttaaaggagttgcgcctgttgtaatagctcttatattgtattcttttacgagcatgttcaagaaactaccaaagtctaaaactaacatactactattaattatagcagttttatctgttggtgtattcaatataagccctatttatttaataattggaggaggtgtatatagtctatgtcagaaataatactactcttcttaatattccttaaaataggggcatttagttttggtggcggttatgccatgctaccatttatccagcaagaatttatatctaaatatcactttataactaatcaagagtttttggatttacttgctatatcacaatctacaccaggtcctgtagcaataaatagtgctacatttgtaggatttaagactgctggcttctttggttctctagctgcaactattggtgttacaatttttgcattaataggtctaactattatatcaaagttattttctaaatttaaaaataataaaaaggtagaaaacttattgacagttcttagaccaattactctaggattcatattatcagcagctttttcatctgccaaagaagttaattgggatttatatggaataattgcatttatagcatcattttatcttttatataaaggaaaaattggttccattgcaattgtattcgtctttggtattctaggtatattactcacatttttatgataatgatacctattttatatttagcatattaacataaaaaaaggagcttttaaagctccttttcatcatcttatgcactttcctcttgatccttaagtactatgataggatttactgagtcttcgttcacagatttctctgttactataaccttctttatattatctctagatggtacttcaaacatagtttccatcattacgctttcaactatacttctaagtcctctagctcctgtatttctttctatagcctttttagcgattgcacgaagagcaccttcttcaaattctagctcaacatcatctaactccaataactttttatactgttttactagagcatttttaggttcctgtaatatctgcattaatgcatcttcatccaacaactctaaagtagctaaaactggtattcttcctataaactctggtattataccatattttaataaatcctctggaagtactttttcatacagcttccctaaatctaattcttttttactttctattttagctccaaaacctagtgttttatctccaccacgtttttgaattatcttctctaatccatcaaaagctccacctaatataaataatacattagtagtatctatctttaaaaattcttgatggggatgttttcttcctccttgtggtggaacatttgcaacagtaccttctaatatttttagaagtgcttgttgaacaccttcaccactaacatctctagttatagatgggttttcagattttcttgcaatcttatctatctcatctatatatattatacctctttcagctttttctatatcaaaatcagcagcttgaataagttttaaaagtatattttcaacgtcttctccaacatatccagcttcagtcaatgatgtagcatctgccattgcaaaaggtacatttagagttcttgctagagtttgagcaagtaatgtctttccagaacctgtaggtcctaataaaagtatattactcttttgaatttctatatccttactactagattttttactgtatattctcttataatgattataaaccgcaactgataaagcttttttagctttttcttgacctattacataatcatttagaatctccatcatttcctttggttttggtaaagatgtagtatcttcatctatagtatcttctatttcttcctgaataatttcgtcacaaagttcaacacactcgtcacaaatatatacatttggacctgcaattaatcttcttacttgatcttgatttttaccgcagaatgaacactttaattgtcgtttttcttcatatttagacatattaacacctctctctatctacggtctctttgtaaatacttcatctattaaaccatattctttggcttctagtgcactcatgaagttatcacgttcagtatccattttaattttttctaatggctgaccagttctttcagataatatctcatttaaagtttcttttatttttaaaattctctttgcatgaatttctatatctgttgcttgaccttgagctccacctaatggttgatgtatcattatttcactatttggtagtgctagtctttttccttttgctcctgctgccaacaagaatgctcccatagaagcagccatacctatacatatagtacttacatctggtttgatgtattgcatagtatcatatatagccattccagaagttatacttcctcctggagaatttatatataaatgtatatctttgtctgggtcttcagcttctaaaaataatagctgtgctactataagccctgctgtggcatcgttaacttgatctcctaagaagattattctgtcttttaatagtctagaaaaaatatcataagatctttctcctcttcctgtttgttcaacaactacaggtactaatgccatggtttcataccccctttattctatataatttacagtagcttttttaagctactgtaaattattatacgcatttaactaaattatatttgcacatcattatatactaaacatttcataacgtcaactatattagttagcgtttattttattaagctattgttgcattatcaactaataaatctattgtttttcttatttttatttgaccttttatatcttctttgtcagcatctcttaaagaagcttctattttttctacttccatattgtaagcagaagccattttttctaactcagccttaaattcttcttctgttgcttcaattccttcagctttagttattgcttctaatactaaagaagacttaactaattttttagcatcttcttttctctcttctcttaattcttccatagttctaccagtcatctctagtaattgttgtaatccaaatccttgatattgtaattggtagttaagttcatttaacatattatctatttgatgttgtatcataacttctggtatttctatttctgtattttcagcaactttttctactactgaatttctagtttctgcatctgctctatttttagcttcttcttctaacttagctcttacatctgcttttaattcatctaaagaatcaaattcactagtatctttagcaaattcatcatcaagtgcagataattcttttacttttacatcatttatttttacattaaatacaactggttttccagctaaatcttgtgagtgatattcttctgggaaagtaacattaacttctacttcttcaccagcttttttacctactaattgttcttcaaatcctggtataaatgtgtttgaacctataactaagttataattttcacctttaccaccatcaaaagctacaccattttcaaaaccttcgaagtctattatagctgtatctccatcttctaaagctttgtcttctacacttactaatctggcatttttttcaaccatttcttgtagtttagcatcaacattttcgtcacttacagtattctcaaccttagctatttctatacccttgtagtttcctaattcaaactctggtttaacttctacattaagaaccataaccaacccattatctttacttatttcttctatatctaaatctggattgtctattgggtctatgtctaattccttgatagcttctggataaacttttgggaataatatttctatagcatcattgtagaatataccttttccatattgagtctctataacaattcttggagctttaccttttctaaatccaggtatattgtatttatttctgcttttattataagccttatttactgctgcttcaaatttattgttatctactgttatttttaaagtaactttattaccctcttttttaattagttctgctttcatccttctaatcctcctagtgatatttatgtaatacccgataacggtattataattcattctatttataattcaaccacttaattatatcacataagtttttttatttacaagtgttccattaatatcgttgtacttatttgataaaatttaattttttgagcgttttttgccatttttttagataaatacacctttatatgcgtatttcttcaatttttatgtcatcttcttctatatccataatgacaaaacttttatacgatactcctcttggaagtgaagtgcttccaggatttatgtaaagtacaccatctttaatttctctaaatggggtatgggtatggccaaatataactatatcagcatcaacttcagttgcctttttttctaacatattagttccatattttacaccatacttatctccatggcataagaatatggttttatttgccacttcaaagacaacttcttcctcaacagcatcaaagtcacaattacctttaactgcaataatacctacattagtcatgctatgaatatatcttgaatcagtaaagttatctcctgcatgaattattaggtcacattctttcaaatatggtattgttttttccatatttttaatcatcatatgtgtgtcgcttactatgcctattttcattacttcactaccctttttataaactcttgtttcataagttttagtgcgtttgctctatgactgattgaattttttataacactaggtatttcaccaaaagtcttatcatatccttttactataaataagctatcatatccaaaaccatttttacctttttcttcaaatcctatcattccttcacaaattcctcttactacaaattcttttccatcaggaaaaactactgctattgcagagacgaatcttgcatttcttttgctcattggtacattttgcatagcttttaacagtttttttctattttcttcatctgttgcatgttctcctgcatatctagctgaataaacaccaggttttttgcctaaagcatctacttctaagccagaatcatctgatattgctataagtttagtcttttttgctattgctctagcttttatcaacgcattatgctcaaatgtttttccatcttctactatctctatacctgctaaatcaacatcttttaaagagtacactttatattcaaaatcttttaagatttcacctatttcttctagcttatgagcattattagtagcaatcactacttcattaccataatccatacccaatatctcatctgctatttcacctaaagcttctctttgaagccttattaattctttattccctttttcgcctaactctaacaataaatttaaatctgctcttgaaaaaggtttctcttctcctgtcccctgtacttctacaaactcacacttatcagtcattattatattcatatctacctgtgctttagaatcttcttcataacataaatctagcatgtgtattccatttacaataccaacactaattgcagatacaaaatttgttattggcatctcttttattgtctttgctttatataatttatatattgcttctgcaactgctacaaatgcccctgttatagatgcagttctagttccaccatctgcctgaatcacatcacaatctacccaaatagttctttctcctaatttattcaagtctacaacagaccttattgctcttcctattaacctctgtatttcttgtgttcttccatcaatttttcccctagatgcatctcttatctttctttgttgtgttgctcttggtagcatagaatattcagcatttatccatccagtaccactatttcttaaaaaaggaggaactttttcttccactgatgcagtgcatataacctttgtctctcccatttctataagaacagaaccttctgcatactttgtataatctctagttatctttacaggtcttatctgttcgttacttctatcataacttctggtcattttttatatcctttctcatattttttattttttataaatttatttttataatttttaattttgtcaaatattaattattgtcatttttcgtaatcttattagcttactgaactattctatcattaattatagtagttttctactaaattaagcgactttttaactctctaatacagcttttacttcatctttcgatgataactttaataattctaaaaatctctcttcatctataactttaattcctaaatcatttgctttagtaagtttagaaccagcttcttcacctgccaaaacaaatgttgtcgatttactaacactagatgtagcttttccacctcttttttctatcatatctttcgcatcatttctttttaatgtaggaagtgtaccagtcaatacgattttcatcccttcaaatattttttctactttttcacctgtattatccaatgattttgtatttactcctacattttttaacttgtttataacgttcatatttttgtcttccttaaaaaactcgacaacgctgtttgccattatacttccaaattcctctaattcttctagttgctcactagttgcagaaattacttcatctaaatccttaaagttatatgcaagtatcttagctgctttaactcctataaatttaatacctaatccatttataagtctccataaatcattttcttttgatttttcaattgaatttattaaattgtcagcagatttttcgcccattctctctaggtcgactacatcttccttttttatataatataaatcagatacatcttgaataattttttcatttaatagcagtgtaattatagattctcccaatccatctatattcattgcatcccttgacacaaagtgtataattccccttcttatttgggctgggcaagacatattgatacattttacagcagcctctccttctaatcttattgttggctctgaacaaactggacacttttctggcattttaaaatctatttcatctccagtacgttcctcttttataacttctaaaacttgaggtattatgtcccctgctttttgaactaatactgtatcatttatttttatatctttttctcttatataatcttcattgtgaagtgtagctctacttacagtagtacctgcaagtctgactggttcaagaattgctgaaggtgttattgtaccagttctcccaacttctactattatatctactattttagttttcttcttttctgctgggaatttatatgcaattgcccatctaggacttttggctgtatatcccatttcgtctctttgttttatattgtttacttttattaccataccatctatttcgtagtctaaattacccctgttatctgtccagtattcaatatgctcaataacttcatctatacttttacaaactttataactctgacttactgaaaatcctagtttttctaagtactctagtgattcactgtgactttctaaatcatattcttctatattttccatattaaatacaaatatatctaatggtctctttgctgttagttttgggtctaattgtctcaatgaaccagctgcaagattccttggattagcaaataatggctgttcttgttcttcttgttgttcatttacttttctaaaattatcttttgatatatatacttctcctctaactattagttcttttttatcatttatcttaagaggtatgctttttactgtcattaagttttgagaaatatcttctcctacaactccatctcctctagttgctcctttttcaaactctccattgttataagttagacctacagaaagaccatctattttaaattcaacaacatattcaacattttctcccacatattcttgaactctcttatcaaaatctctcaaatcttgctctgaaaaagcatttgataaactcaacataggagttttatgtacaatttgattgaatttatctaatggcttacctcctaccctatttgttggagaatcaattctctttagttctggatgttcttcttctaaagaaattaactccttcattaacttatcgtattcataatctgatatttctgggctatcttgattataatacctttcattatggtagtttattgtctctataagtttattaatttcatcttttacgctcactttttgcacctcttcatatttttaaaattaaattattttgaaatttccctataattaattatctcctatttatatattttttagtatatcacttttttgactttaaatttattacaaaaaaaactcttattagtatctttaatacgactaataagagtttttatttttatcaaaattttttatttttaatagcctcttgatatgtctacaacattatctacaggtttattctccattatatagtgtttcaaattattataaaccatattaaatgttctctctttgtttttatctgacacccaagaattatgaggagttactatgacattttcgcactcccacaacttattgtccttgtttaaaggttcactttcaaatacgtctagtgctacccctctaaatttctctacacattcttctaaatctttctgattaactgtatttcctctacctacatttataaatacagaaccatctttcataagtttaaacatatctttgtttactattccatctgtactttttgtagaaggcattgctacaactactatatcacattcttcaaatacaatattcatatcttcagtagcaaaacacttatcaaagtattttttactacttccatcagtattgacaccccatatttctacaccaaaagcttttaatcgttttgctgcttctgaagatatagtacctgttcctaaaaatccaactctttgtccatacaattctgatacagaaaaatccatcttccattctttattttgttgttgtttaaaaaattttgcactatttttatatatttctaaaatatacaatacaatactttcaccaataggtacactatatccgcctctattattagctatcttaatatttctcttcaatacctcttcttttggaagttggtctatacctacactagttgtctgtatatattgtaaatttttcatcttagaaatatctaatctctcaaatggattgtatgtaactagtacatctgctgtatttacatcctcattattttcaatactatcttcagagtaatgtatgacatcatagcctaattctcttattttatcaaatttttcttttccataatttattgtaaataaaactttcatctcaaatctcctctatctacccacatttaaaattttatattctaaaatataatatgatactcaatgtacattagttaaaattactataagatatcttaaatttacttatgttcaattgtttttcctaaagacatagcattacgttcttgaactaaattttctattaaattattcaatgtccaatcaatagatgtctctgttaccatagctgtaaaaggtctatttattctcactttttttagaccttctaaaaatgcatttacttgtgtgcttggagtgttattaaatattacagacttactcttaatcccattttcacattcacttgatatatttccatctaaaatgtctcttattatattctctccgtttttttcacttaagattatatggtctcttattccagcaaagttacttacgtttttaattaatgataattcttttttattaaagtttacaagcataatacacttcctattgtgtattttatctaggttattattatttattttttcaaatgacattttatccatcctttcatttatttatatactttaatttaccccatacatttaaaataatcaatttttatagttaatttttatattaatacccaaattacatttaaatagttaggctatccaaaactaatatataaaattagaataattagattaatatctacaaatcataacctaaaggagagataccatgaatacattactaaacaataaatttagcattaaaaacttttcaaatgcttgggttatagtacttggttgtatgttaatacaagctgttccatttagtattgtagcaagtatacagcctcaatttataagttatgttgtagaaggagaaggctttagtttagcttctttttctctaatattcactattggtactattgcctcagcaattgcatcaccttttataggtgtattattttctaaagtcaatattaagatactatatttattaggttgtataatttctagtattgcttttgctactttttctatatgtactgaactatggcaattttacactgtatcatgtattgttcaaattggcgctacaattatatctgctataggaatacctgttttaataagtgcttggtttgatgaagaaagcaaaggaaaagctttgggctttgcttttgctggtggttctattggtagtatatttctacaaccacttgcagttcgcttattagcaactcaaggatacagtcattcttatctaatatttggaattatagcattaatagttggtatacctgtaatattattcatactcaggatgcctaaagatattaatgaaaaggtaaaatctaaaggtaaaaaagagaaagcatctgatacaatttctccttcagtatggggttatacattaaaagaagctaaaaaaattaaatatttttggattatgactattggatttatatttgttggtatatatgtttcatcattatccgtacaatatccaacttatcttagaaattatctaaatcctattctaataggaacagtaggctccacatttgctttatttgctctcattggtaatttatttggaggattattgtttgataaattcggtcaaacaaagccacttattatatcttttgtattggttcttatagcaactttatcattactattggtagataaatcttctacttttgcatttgtatttgccattttgaaaggtctttctgtatttgcttatatgattggtcctgcttatttaactggctctttctttggtcaaaaggagtttggtagcatatatggaatcgtacaattaatttttgcagtgggatttgcattaggttcaacattatttggattgttagttgataattttggatacagattttcttggtctattataattttatcagttataattgcctatactttacttattataacttctataggaatgaaaaaattgaataaagaaagattagataaactaatgcaataattgatttttagatatataaatattataataaaaaagatggagcttttaatcataaataaaactccatcttttttatattacaatatagctaattttctcttatttttaactttactatctatatcctcatccttaactatagtaaatgccttagttggacaaacatttacacatgcaggcccttctggcgattctatacaaaaatcacacttatttgctgtcattctttctctaaagcaaagctttccttcatctacatcttttaatgtaactatgtctattgcacctataggacatgctaacatacaagtcttacatcctatacaattttcttcatttatttttattgtgttcccaaccctaactataccaccatttggacatgcctttgcacaaggagcatcttcacaatgtctacactgtattggagcacttacttcttttgtctttatgacagaaagttttggattaaaatttatttcatctggattttggtaaaaaatatcttcatctgaatgtgcaactacacatcctatcatacaagttctacatcctatgcatttatcagggtctgctataacaaaatagttcatcacttagccacttcctttcctatacaatatgtagtgtgtaatagatgatgagatttttctcctaatggttctaccagatattcatcatacagttttttaatatcaggattctcatgagattttctaattgctaaatgttcatcatgcacgtatgttgcttttgttctattttcataagccaattccttatattcttctagtaaaatttttggttgacctccaccacttacacacccaacaggacaagtcataacttcaataaaatctacatctaattttcctttttccaagtcttcaagcactggtattacattttttaatccacttactactccaactcttaagtctaagtctcctattttaatagttgactttctaaaaccattttctcctcttacttgttttacttctacatcaggaatactttctccagttataagctcatatcctgttcttatagcagcttccataaccccaccagtaacaccaaagatagttccagctccactataactacctaaaggactatcaaatttttcttctcttaaatttttaaaatcaattcccatgtcttttattaaataagctagttctctagtagttaatactacatctacatctctatatccactagaatccatttcttctctatcacattcatattttttacatgtacatggcattatagaaacactaaatatctttgatgcatctacattatttatctctgcaccataagttttaaatattgcaccacccatctgctgaggtgatttacaagaagataaatgattagttaatttaggataatttttttccatgaattttacccaagctggacaacaagatgtaaacattggaagagttccaccttctgtcactcttttaattaattcactaccttcttccattatagttaaatctgctgcaaaattagtatcgtagactctatcaaaatttaaagctctaagtgctgctgccatttttccagcacctaagtatcctaaataatatccgaaatcttctcctaaagcaactctaactgctggtgcacattggaccatagtgaatacatttgggtcacttaaagctttctttaccttatctatatcacatacattgtatgctgcaaatataggttcatttatagactctggtatctctctttcttgttttttctcttgtaaaaactcaaatccttcatctataactgaggcataagatttacaagtttgaacacattgaccgcacataacacatctatctaaatttatctcttgtggctttccctcttcaccttcaatagcatttactggacagacctttgaacattctctacatccagtacataaatccttatctatatttattatcataaacgtcacctacccctgtatcctttatttatttgttaacaataaactaagtgcagcttgtctattcttagcttttttgtcatctattggagtaacaagttttaatgcttcctgaggacatgcacttatacaagctattttttcattgtctttacataagtcacatttataagctatcttcttattttcatctaaaattacttgttctacttctttaccatcttcatattgtggaagtaagtctatagctccaaaaggacatgctagcagacaagttttacatcctatacacttttcttcatttacagacataatattgttttctttgactatagctttttgtggacatgagtttaaacaaggagcatcttcacaatgtctacactgtattggcatacagaaattgtcaccttttactaaataaagtctaggtataacaggtatatcaactgttccaactgtataacccacattattatgctgattatgcattgtaaaacaagctacttcacaagctctacaacctgtacatttgtttgggtccgctattacaaaagagcctattttatttttcatattatcccacctttcaatttgtatatttccaaccctctagttactttcatcatatgtctacttactttcatcatatatatttatatatttcactattttctcagtacttatatttcgtttacattttttgcacaaattgtatgtgttattatacaccttatcagtatcgtcaattaatactccacagatttcacactttgaacatttttgttcttcttttttagtacacatatacttattctcactttttgataactctctgtggatttgcataaatattcatccgtcttcctcttacaaatccaataagcgttatatttaattttttagaaagctctattgataaattagtcggtgctgattttgatactacaataggaatttgagtcatagctgcttttaatatcatttccaatgatattcttccacttacagccacaattttatcttttaatgttatgtcatttaaaacacaaaatccaatagccttatccattgcattatgccttgctacatcttcacaagtgactatttttttatcaaaattaaatacagatacgctatgtaccccaccagtatttttaaataattctgatgaatttaaatttctatccattatactgtaaatcgtatcataatttatttttatattgctctttacagaagcacatgttatatagtctagtgaatttaaaaatataatttgctcatcttgatttttttgtttctcttgaatagttacttttgcaaaacgttcactctcatttatctcaaattttaataagctttttttgttttctatgtatccttttgttttcaagaatcctactataagttcctctaaattatatggggtacataaaaatgtatttacatatttatcatttaaaataaaactaagtggatattctgcaattatttcttcattatctattgatacttcatgttcatttattttgcttacttctacattaaaagaatttaaatatttgtagtccactagactataactattttcaaaaactttatccttactattttcttgtaatttagtttttgagtatatattgttcataaaatattagcctttctgccttttataaatcttaaatctaataaatcattagatatttgtagctgtcattttgtctttcaaactttgatactcttctcttacacatttttctgctaattcttggtcttcaagtttttcaagtttaacagcacaatatttatactctggtgttttagatatagggtctaaatttgctattgtaagttcattgcaagctccaacccaccactgataagtcatatatgttgcaccttccttaactctatcagtaactgttgctcttgttattacacttcctcttcttgaactaattctaactaattcatcatcttcaattcctaatttttcagcatcattagaatttatttgaacacgtcctggttcatcttctaatgaactaagtgttctacaattaccagtcattgttcttactgaatagtgtccaacttctcttacagtacataaactaaatgggtattcatcatcttcaacttccatagggggtctccattcagcagcgaacaaattacctttaccattaggagtagaaaacttttgaccttcatacagatacatagttcctttatcttccatactttcactcttacaaggccattgaacgcatccttgagtttctatcttttcataagtagcacctaagaaacttggacataattgtctaagttcgtcccatatttccttagtatttttataattcataggatatcccattgctgtagaaatttcgcttataatttgccagtctggttttacatctccttgtggctctatagcttttctcatcaattggaatcctctatctgcacatgtatatactccctcatgttctccccaagaagtagctggaagtataacatcagcgtgaagtgctgtcttattcataaatatatcttgaacaatgacaaattccaattcatctaatgcttctctaacttctgatgcatctgggtcactttgcactgggtcttctccaaatatataataagctttaagctttttctcttttagtactaagtctggaacttgagttaaactataaccattattaggagataattttaccccccaagttttttcaaacttttctcttatcttatcatcagttacattttgatagccaggatatacattaggaagagctcccatatcacaagctccttgaacattattttgtccacgtacaggtcctattccaacgctttctctaccaaaattacctgtaagtagagcaattgatgcaagtcccttaactacatcaacagcttgaccaaattgacagacacccattccataaagtatcatagcttttttcccttttgcatattctctcatagcttttcttataagctcttctgggattcctgtaatcttttcagcatatttagctgtatatggtttaacaatttctttatactcatcaaatccttgtgtatgattttgaacaaattctttattgtaaagaccttcttctattaatacatttccaaaagcatttactaaaaccatgtttgttccaccttttataggtagatgtatatcagcaattcttgcagattcagttactctagggtcagtaacaattaatttagcaccattttttttagcttttactattctatttgccactattggatgtgaatctgctccattatatccaaatataaataaaacatctgcattttctatctctggtatagaattagacattgcaccactacctaatgagtaagccagaccggctacagatggtgcatgtcatacacgagcacaatggtcaacattattagttcctattgtagctctcataaatttttgcattatatagtttgcttcattaccaggtcctcttgcagaacctgttcccataatagaatcaggtccatatttttctttaatttcatttagtcttgaagctgtatagtttatagcctcatcccattcaacctcttctagtacaccttgttttcttatcattggcttttttagcctaggtgttagaattttagggtcatttagaaaatcccatccataacgaccttttaaacacaaactttcttgatttgttctaccattagccggttcagctcttaatatcttattatcttttactactagatataattggcatccagctccacagtatggacaaactgttaaaatttttttctccatacaattccccccttagatttatcccctgataagtaaaatttatcttaaagataatgagtgtttttataatatgcaaaatcataaatattttgcaatactatctattaaattcaacaattttctcacaattcctcttaaatttcaaaaaaaatatgtcataataatctttatatttcaaccatttaattaaaatattctagttcttatgacatattttttaatatactcaatatatattctttaaacttatttagttttcacttaaaacaatatttctgccaattctatttttcattctatagtgagtaattacagtaaatattccacttccaatcagaattaaatagtacataaatccaccatataaaaatactgcatatcccatcaaaggttgagggaatactgatttgaatatagtgaaaaaggctaattcattagctcctacattcccaggtgttggtattggagatattgccatatataaaaatgcttgtaatgtcagtatataaatatagctataaccttgtaaattaaatgctttatatatccaaaatgaaacactaaagtaagcacttaattgaataaaagttactattatagttgaaattaatacctttttattctttgcaaaaaaatttattgctttactataatcatctataaaactttctatggattcaatcttattatctaaaaattttaaaaacttaatttttgataaatgctttatagtaattctcataaaatattttatttttttagggtttaaaataactaatattatcataattaagacaaatgaattaatggctatccctagaaacactagaggcataatcattttcatttgtttttctaacatagcaaaattcattaatacaagtattgtacaataaaaagtaaccactatttggaaaataatagacttattggtaacaactgcacttgccttactaagtggcattttacattttttaagtacatatatctgtactggttggcttcctgaagcaaaaggagttattaaattataataaaatcccataatggctagcttaaaaccaataaatctaatattaactttgtgagtgctttctataattatcttcattactactccttcaagcattatgtgacacattattgccaaagcacctatgaataaaaacttcttatctaccataaccataacatttgatagcattttaatatccaatgttttaaacactaggtaaattgttatacctattaacaaaaataaaaatgtatactgtagtaaactctttctaatattctttagtctatccattagaaataaccatcctttgctcaagatttatactaaatactatattattagtatacactatgaatcttaatattttataacaaaataccttacaattttgtcatttacaaaaaatattaatctataaattaaattttaatatatagattaatattttacaaacattttgtagatatatataatattttcactaagcaacacttatacttattacacccatttataccctatcccccatacagtttctattgtataaatatcatattgttttaatttgcttcgtatattttttatatgctctgtgatagtacttatatcactttctccatcaaaaccatataccgactcatatattctttcttttgaaaatacttgtcccttattttttgctagaaattcacatattagatattcacttttagtaaaattaatttttttaccatcaattgaaacttctttgcctaaaaagttaaattgaacatttgagatagttaataaattctttttttctctactttctcgccttaaatgagcagttatcctagcccttaattctcctacaccaaaaggtttggttatatagtcatctgcacctatgccaagaccgtacataatatcactttccatattttttgctgtcaaaaacagtattggacaatcaaccttatttcttatagttttacatacttcaaaaccatccatcttaggcatcataacatctaatattattagattaaaataattaaaatccatgttcatagccttttctacatcactaattacctttacttcatgtccatctcttttcaacacattttcaatcaactttaacatatctaactcatcatctactactaatatcttagacataataactcctccatttatccgtttaatagtattctaatttatatctttaataatatctttaaaattcacattaaccataatactctcatattatagcttacaataattaattactattttacaaataaaatattttagatacaaaaactttatatttcaaaaactttatattcattttacacgcatttacttaaatataaaaatttatttaacaatttattattgtaatattttgaatatataataaaattaataataagaaaactttttataaatacacttttaattgtttaaattggaggaaaaaattatggatgaaaatataacaaaaaataattataatgttccatttgactatgttcgaaaaaaactcaaagaattagaccctcatacaattagtaatttaagtaatatacctttcaataatgatttaaatagattcacactcaatttttttgatagacaatatattatagactatccaagtggagaagtttggaatagtaatggtagcctttgcaataactttgagcttaaaatcttgatagttagatatttaatcaatgctaaaggtatccctagaactaataaatatgtaacttttaaagaaataccaggaggcaatgtttattatccaaattttttaaacaggactctatataggctttcagaagtttttacatctcaaatagacaaatataagttagttatggagaaaattggagctgaaaaagtaaacatgggagatttagcttataggtttacatatatgggtaatacatctatgatatttatactttggtttggagatgatgaatttcctccaaattcaaatatattatttgattctaatatagtttattacttcaatgcagaagatttagcagttgttcctgatacagctataaatgcaattttaaataaaataaatcaattataaatataaataatattataataaagtttttgatagatttaatagaatataatatgaaatggggtaaaaaatgaatgtagaaaatcaatctttatcagatattgaaataatattatcacacaggtatgataatggtgcagactattggactacacctgataagcgtttaataaaaggttctcctttctctactcttgatagtgtactttatctattagagttaggtgtgaaccctgatgatactttacttaaagaatgtgctgacttgatatttagcacatggcgagaagatggacgtttcaaactatatccaaatggaggtatttacccttgtcatactgcaaatgctgctaacgtactctgtcatatgggatatgcatctgacattagaatgcaaaaaacgtttcaacattttttagatacacagtatactgatggtgggtggcgttgcaataaatttagttttggtcgaggtccagaaactgaatactcaaatccactaccaactcttaatatattaaatgcattccgttttagtaattatctaaataaagaatcaaaacttgacaaagctgtagattttctacttgaccattggactattaaaaaaccactcggcccttgtcactatggaattggcacattatttatgcaagttgaatatcctttccgtaattataacctattcctttatgtctacgttttatcattttataatcgtgcaaaaaaggataagagatttttagaagcattgaagatacttgaatctaaaatgataggtaataaaattgtcgttgaacgtgtagttccaaaactatctaaattatctttttgtaaaaaaggcgagtcaagtgaaatagccacaacacactattacgaaatattaaaaaacctagaaaaataatagttatatagataaaacatattaaaaaatagtggctttaaattttttaaagtcactattctatataaatataacattataaaaaatatattaaactatttactcttttttaaaaccgttgattttcttgctatataaaaaactattattatagaaataactactagagaacctctatttataaagaaataattctttaattcattaaatctaacatctatattattaggcatataaaacatcttttgaatataaaatccatttacattaatcatactaacaaatgggtacatatgtaaaataaaaaatatatcagcaaatgtatatgtaattaatattgctattgttgtaaatctattttttgttaatgttaatatcattagtggaaatgttgtataccataataatgtaggaaatgtctttaaaaacacatctattggctttacactataaacaaaatctattttgtctatgttaaaacctttcactgacgtaaatgtatatactattgtaattgaaattaataataatacagtatatatagctaatataacacaccatctaaatactataaattgattatatttttttttattatataaagtaagtatctcatttatattacccaaataatcttttgaaaacacataaattattgtgattgctgacattattggtataaaaacatctgatatctttataattcctaaccatcctgctatagaatatgtatccattataggtacatcattataaaatattaactcattataatctaatatgcctgtaataaatatgcataatatagaaataattacaaatattaacacatgtttaagctctatttttttaagctcaaattttattaactccaatatacacatttattttaactccttatgtaaaaagtttatataagcatcttgtaaagttgtatctatccttaagctatccttaagtttctctgtatttttacctatatactttacttgcacaccatctttaactcttctataatcaataatatcaatattacgttctaaatattcaaattcatcattagaaactactactgaatacacctcaaccatatcaataaatttattaattgtaccatcatataatattttgccttgatttaatataattaatttgtcacagttaaattgtatgtcttctactatgtgagttgaaattaatactatagaatttttacttatttctggtaacaatcttctaaattcattcctttgctctggatcaagaccaactgtaggttcatccataactattaacttagaatcacctattaaagcctgtgctatacctagtcgtctctttacaccacctgagtatgtacctattttattatttataaacttgtccagattaacttttgatactactttttgtatatgtttctttaaatcattcttagatacacctctcattttagctacaaactctaagtattcttgcccatttatattattatacatatcaaaatcttgaggtatatatcctacatttgccttgattttctcattgtttttgctatactttatattatttaattctatctctccaattgaagtttcataaagagtcactaataacctcattaatgttgattttccagcaccattaggacctaataatgcaactactccatctgttagggttaaatttatattatccagagcttttttatttttgtaattaaaatttagatttcttatttctaacttgtttatcatattaacctcctttattatttatctattataaggatatttcctgaaagccaatgataaatagttatgctaattttctctccctttgagtcttcatataaaaattcattgctaggtaagtcagcaactaatatcatattaattttttttctttttattgattccataacattatctacttcatctacatattttttagcatctacagatgctttgctatcacctaatatttcatttcttgtttcaattaaaaatttaattttttcctctatatccatatttacattactatctgatggatagattatttttatatcatcttttacctcttctttaaactcacctgcatatattgcaatatcatttgactttccttcaaatatataatctttttttaaaaaattactagtcttattcagtaaaggtaaatttgaatagacattatttttagaacttaaatttattttataagccatacaacttgattgatttacttttgggtaccacgctaaagaacctggtggaagcataatatcatctttagtagctatatatttattttgattccaagatgtcaacacattaatatagccttcatactctatatctaatgtcacctcgtcattaggctctaaactttcctttaaattaacttcaattaaatccttttttttgttaaattttatattttccgaatttacttttatatattttatatcaaatatttcatctaaaatcatattaatatttgttaactcttcatttgatgtgtttaataaaacaattctatcttttatatttgacttgcttttaaagtcaatcttcatatcatgcgattttattttaatatcactaatattagatttctttaaatactctccataactacgttcctcatctctatatgttgacatatctattgatatataatttaatccaataaataaaatactgtacactactataactattaatgatttaatctgtttctttctaatatcatttaatatcagatatgctactattattaaagtaattgcaaatagtgtaggtataatcttatctataacatatgctgaattattaactttccctacaaaatcagaatagtaagcatatgattgatcttcaaatatattaagtgatttaaataatgctttaaaaaatggttctttaatatcaataactctatccaacatcttagttgatgttaaatataaaaatactgatgataaggtaatctttagtattaaattatttataataactgaaataaatgatatcactatagataaaatagtaagtggtaaaaaccattcaaataccaatataaatatagttgatttaatcgttacaattgataatgttcttattaaacttgagtatgctatagcatatataattggtatgcaacaaaatataaagttgtttctagttacagcaacagaaatacctaaaaaataatcaaaattatttctacataatatttttacagtatcataactttttctcatataaaaaattacatttaacatggttaaaatactaattgtcatacaagtatatacactcaaggataagtaatcattaaatgaaattcctctattggatatatgtgtccatcgttgtatgagatggtaatttataataataactgttattgcaaataaaatattttttctaattattttggttataaagtctgatataaccttaatactactcatatttatgcccctcctagccaatcctttgatacaacttacaatagattcaactatatttaataagttcaaatatttaccttgacattattttttaaaattaatattaattagtgaaattaattaatttagaaaatgttttataatcttactgatcattattaaccttcattccaatatatattaatatagcaatccaatatatagaaattattgcataaatcacatattgctgaaaaatattaagtattttacataaaataattaaacatattattacgaatagtattttttgcacagtctttctataatgctttttctcactttcactaagaggtttgtttctatgttctaaaggagctaacttgtaaattgttagtatactaataatcattaataatactaataaatacttatatttatttatatctatattattagctgaaaaaatagttatcaaataaataactgcaaatgttaatgtacactctttataattcctagcatgataacctcctgtgaactgtcttaaagtgcaataacaacttaaaaatataactgtatgtataaatctatcaaaaataattcctataaataatgctaccgaaatattaactatgaaataaatcaaagtttcaaatccatatctatatatttcaaaatcttcactttctacaatctcattattaactaatatattggcaaatttatatgataatcttttaaacatatttcctcctcaacatgtaaaacctctcctttaataagaagaggtccttttattaatgttatttttttagtttttgtaaagcttgtggctcttttgcctgatgtgctacccaagaacttgcactgtttgctgataatacagctatcccaaaacttaatgctgagatgtttttaagtaagtttaacgctatttttttcattttgtactctcctaactttttattggtatcattatttttaatataaactcattatctgagtaattaactattgtttcaccaccatatttatttactatatatttaatactagcaagtcctattccatgtatcttatcatcatccttactagtttgaatacgtttatcaataagtttaatatcatttaccttagtatttataaattttattattgcaaatttatttatatatgtagctttaacttctattcttttttctagctcattatttatatccatacatgcttcaattgcattatctagtgaatttgcaaatattgaacatatatcattattttcaataaagtttaatttagatatatttatgttatcttcaatttgaatatcatactttttacaaatacttattttttctgctaaaattaaatctaatgttttatttccagtatttttaaaatgttcaaattcacttatctgaaactctaagttatctatatatgatataatttcttctttagtgtcataattttttatacaaatcatatggtttttcaaatcatgataaacatattttaatctatcatgaacttcgtttatattttcataattcctgtagtttgtttttattctttcatttataagttcatactctagatttaatttatcgtcttgtacaattttccctattactattaaaagtattatacttgatgataaaatcaataaaattgcaaatataaatataaataagttttctgtagtaattgtattgactcttaaattatattcaaatataagtaataagctaactatattagataatataggtattcctattagtatcatatctttaggtttaaaatctaaagataatttaaaatacttaaacaatataaaacctataaataaaaatacctttgacataataatagcttgtattctaaataagttttcatgttgtgttatgttaatattatttaatttatttataaatactactagacctactgcagaaccttcagcaatcattaatcctagccaaaacaataaactaactattatacttttatatattttatcttcatatgatgttatataaaatgatattcctattaccatacatagaagaatcttaatatttggaaacactttaactacatttatgtatgccataaatataaatataattattgttgtaaatatatatcttatattagatattttcctctttccaactaagtggattactaaaaaaaatataatccaatctatagtacctgaaactaaattaataatattccaaaatcctatacttagatttgttagcatactatatcccctaatatattagttatagcaagtttcaagcctttaactctatatttacttattggaatacttttgccatctactataacagtacttccactcattgattctactaattttaaattaactatatagctattatgacatctaaaaaatccatattcatttaatatcttttctattttagatatactcattttagtaatatacatatcatcatgtgtataaatcaatatattcggtctatctgtttctatataagtaatagaatctattttaattcggtctacataattttttacatttatagttaagtaattatttctctttttcatcatctcatttatacaaggtaatacacttttagaaattttttctttatttattggctttagtatatatctgtatgcttttacctcataaccttcttgcataaactctacaaatgaagtaacaaatattatttctaacttatgatcaaactctcttatcttcctagcagtatccataccatttattgttttcatttgtatgtccataattaatatgtctaaatctttaggatagttatttagtaactcttctcctgatgaaaattcatatatgttataatttataggatatgaacttaatatttcacttaatatatcttttatttttattcgataatgtagttcatcatcacatattcctatactaatcacaattcttaaacatcctttcttatatatttttaataaatatataaaatttctattcattttacatattttaacatacttctgtagcaaatagctatttagattttaattttagctttttggacattaagtattactttttggatttacaatctattttaattttcattataatacaattttttaatatatattgaatatatttagcgattttaataacatattcttcgagaagtttttagtatctagtttttgttaaacaaaaagtatgcaccttcctttttatagtaatattttaattatcgctataattttgaagaatacacactatattttaaatattcatataaaacatattaaaaaatagtggctttaaattttttaaagccactatttttttaaatgatgttcctgaaaatatattaagttagttattctaatcaatttgaagacttttgcttctccttgcctatatctaacataatttcataatttaatttacctttctttaaatcaactcctgagttacttctaataatcccacaatccaacatttcgtcaaataccttcctagataaacctagtttctcacgtaataatgttgatacctttaactgacatggatatttactaataatatgaacttgtgtaaggtcattaatattaatttcttgtcctactattttatactctggaataccaacttctgctccatttctatgtaaaagttccgtattcatagcatattgcttagcaagattataatcgtttgtatggaattgttctagtgtttctggatttaagctttttggattgacacgagaatatatagttgagttccatgttgaatcacaatttgaacacttgtatattaaccatatatccaaatatttatgttgagcattaaccctaaataaacctgaacaaatatattcagtcttttttccacatttcttacaatacctaattacaggtaactgggagatatattccacctcccaagtaatttttttcataaatgcaacttcctttctataagattactaaattaatagaaagttatgaaaaggtggaatataatcaagtatttttttcaaaacaagacctcctaattttaataaattttaatttcaaacatataaaaagctactacttcttattagatactttacaactctattcgttatctgctgtacaagttattgaaattatttaaattatagcatccacttataagaaactatacctcaaacacttttatcaaaagaaaatgagccagtataattataaaactatactggctcattcttaactatcttttcttttttcttgtaatacaattctttgaatacttttcaaagacaagtaatatttttctgataaatatttcaaatcatatccaacttgataatcttcataaatttgcatatttctaattgataaatcttcacgagtagacgtactacttccccattcttttttattattagactttctaggaatatagatatattctccatctacatattcctgtatcaattcaagtaattcttctggtaatatatgtattgcttttttatagctcattctgcactcctattaaataataattttttattaggaatagcaaagggctatttatatattaaattttatatttgcaatagcccttgctatgcaaaaataaagattaaatcaaacataaatctcacccctccttatatattgcaacgatacatataagtctatcagcagtataaatagttgtcaattaacataacttcttcatctaacctttatattatctttatttattttcataattcatctattttagagactaacttttttcttcttattagatatatttaaagttattaatcaacataagtcctttatcttgagggatttattaccgaacaaggaaccccaactatacactttccacaaatatcacaaccacctatataagtgtattttttttcatttatcatacacatttcataacacttattcctattaaatccatcttcttttaaagcttctttcacgcatttgttgacacattttttgcaactattattatgtttatacaagcagtattcattttctggtcttttagttggctctaattctaaacttgtgattatgcttcctattcttccacaacaccctttttctgtaataagcatattatttaaaccaaatgttccaagacctgctatgaatgctacatgtctttgtgaccagtcacttaccaatttttcactgtcaaaattatacgacccaggaatagcatatgaattagcccccatcttctctagttcttcacataagaaatcatttaaatttgaaatcaacatattagtttctatgtacgctcttgcccatatttcagaacattcaaaccctccaatattactattatttacactttcatcaaaaggtataaaatatgtaattatagtttttccattttccagaaaatcttttggcatagcatgagatgttcctacaacactttttagcttctgaaacatatcatcttcagcagatgcataagcaaacaaaagttcttgccactttgtagttatattatttgatttatgataattttttacaaagttgttcattgatgtttcaatcttatttttcatagtatcacccctagataattctatatttccaatttaatgttattattttatattatataatagtattttataatatgcgcactaattaatattaaaactatgttcatcaatcattcttaaaaaagctcctaatatcaatacgatattagaagccttttcttatctaatctaatttattgcaattcctgcacttgcatatcctgctacagtattaactaatgaaagacctgaagctgttgcagtaaatactagtaagaatcgagtttctgctgttgctgctatatttaatcctgttacaattccactagaaattgaaccaactgataatatacctgtaagtggtggagctagtgtaactgtcgctcctggtacagctgtaaatgagttatttggtgcagtagattggtaaagtgttgctgtaattgtaattgttgaaccaacaagtgaaagtgctgctgttgtactgaagtatgctgaaatagatgttattgttccatctcttggcattgaaaatgcaaagttagtcaatgtccctgctgcgtttgtaaggtctattactccaccaactatacttaatcctggagctgaactaccaaagccaacaaaacctggtgtacctactaatcctccagctatagttgtaagtgatagtggtatacctgatgcaaaaggtattattgcactagcacctgttgggcctgttggacctgttgcccctgttgctcccgttgctccggttggacctactaatccatctgcccctgttggacctgttgctccggttgcccctgttgctccatctgctcctgttggacctgttgctcctattgggcctgttgctccggttgctcctgctaatcctgttgctccggttgctcctgttggacctactaatccgtctgctcctgttggacctgttgcccctgttggacctgttgctccatctgctcctgtatttcctgttgcccctgttgctccggttggacctgctactccatctgctcctgttgctcccgtcgctccggttggacctactaatccatctgctcctgttggacctgtcgctcctgttgctccggttgctccagttattcctactccggttgcccctgttggacctgttgggcctactaatccatctgctcctgttgcccctgttgctcctgttggacctactaatccatctgctcctgttggacctgttgctccggttgcccctgtcgctcctgttgctccatctgctccggttactcctgttgccccggttggtcctattagtcctgctgctcctgttgcccctgttactcctgttgggcctgttgctccggttgctccggttgctccggttggacctattaaccctgttgctcctgttattcctattcctgttgctcctgttgcccctgttgggcctgttattcctattcctgttgctcctgttgctcctgttgggcctgttactccatctgctcctgttgcccctgttgggcctgttgggcctgttactcctgttgctccatctgcccctgttgctcctgttgctcctgttggacctgttattcctattcctgttgctcctattgcccctgttggacctgttgctccaggtgttcctgtcgctcctgttggacctattaatcctgttgctcctgttactcctactcctgttgctcctgttgggcctgttggacctgttactccaaatcctgttgcccctgttgctcctgttggacctgttattccatctgctcctgttgctcccgttggacctgttggacctgttactccatctgctcctgttgctcctgtcgctcctgttgggcctgttgggcctgttactccaaaccctatagctcctgtcgctcctgttgggcctgttccccctgttgctcctgttggacctcttaatcctgttgctcctgtattccctgtatttcctgttgggccagtcggaccggttggtcctgttgggcctgttccccctactcctggacctgttggacccgttggtcctgttgggccggttctacctcttggacccattgggcctgttggacctacacatgatggtggacagcaatgatggcaatcacagctattataatcatcacgaccattattacaatcatcatatttatcatagccattgttgtaatcattatcatcaaatggtccaaaatatttatttctactcattattaaaagcacctcctgatatatttgagcttttaagctctatatataatatgtcaaatttagtatgattgtgacctatcaactatttttaaatttactaaaataattttcattgtgcaaaacagcactatcgttaggtttgatttcttttgttttttcatgataataaatagctttatctgattctcctaacctgtcataacagacacttaattgtatagatggtatatatccataacaatcatttgacttaaaacctccattagtatcattcttatctcttgttaatgctaccttataccaaaaaatggcttctttatatttttgtctatcaaacatatgctttcctatgtcacaacaaatttctgctcttggctcatcaaattcgaaacttctaaacaatgaatataaggcacttttttcatcattaattaagtaataacatgtggctaaatctctgcaggcactgatacaatcctcaatccatcctcttgatgagtctaaaaacttagtaaaaccttctattgcttctttatacctagcattatagtacaactctctagagtaatagaattggtgtcttggctccaatgtttttccttctgaaatcattttttcaaaaattctaagatttcttagagggtcctgtctatgaagctttttatgagatattgcaatgtcagaataaaatacctctccaaaaagaggtactacttcatgaatagggtcaacccatttatgattagaacttcttttaaacaatcgttctctataatatgagagagttgggttaccattttcatcaaaggatacattgtattttgccataacaatatcaatggaagtatccaagctttctttaatctttaataatttttctctatcagcttctaaaattatgtcatctgcatcaagccacatagtatagtctttagaagctttagaaaatgaaaaatttcttgcagcagagaaatcatctatccattcgaaatcgtacaccatgtctgtatattttgagactatttcttttgtggaatctgtagaaccggtatctacaattataatttcgtctactatatcctttacacattctaagcatctgcctataacttcttcctcattcttaacaatcatgcacaaacttattgcaatcataatgtacaactcctttgtcttctatatattgcagacataagtaatatatggtattttctcttgttttgttattaaatttataaaaacttttgacgacagaaagttactaaagaaccttatcttttatgtattttttatagtagaatttattaaacttgaaatttggtaataattgttgaaatgataaaaccatatttaatttcatacaaaaaagagtgtcccataaactaaaaagttcattttgagacactcttatttaatattatatatatatttgtaaaacagacattttaatatgatactttgatactttattcattcctattcattcctattcattatataatcaatcagcccgtactctttagcctctagtgcagtcataaaattatctctatctgtatctcttctaatatcttctattgatttacctgtattttcagaaagaattttatctaatcgttcttttattttcaatatattatctacagctatttttacatctgttgcttgacctttagctcctcccattggctgatgaatcataatctctgaattgggtaaagcacatctttttccatgtgttcctcctgcaagtaaaaaagcactcatacttgcagccataccaatacagatagtcgatacatcacatctgacataattcatagtatcatatatagcaaatcctgatgtagcagagccaccagggctatttatatatataattatatctgaatctgggtcttctgattctaaaaacagtaattgagctactactaaacttgcaatagcatcattaatttcttctcctataaatataattctatcttttaataattttgaatatatatcataagacctttccccttgacctgtttgttcaattacatgtggcactaaactcatgctactttcacctcacaattaatattaaagttaagataagaattgatttcatctcttctttgtttataattcatatttgcataagaaatacatttttcgctttgaatttgatgatttagatttaaaacaaatctctgttgaataggataaaattcatctttatttctatatacttgtggagattctttatataaatttctaaatgctagtgtaaaagattgatgtgtagaatatcctactgtaatagctatatctataatatatttgtctgtaaatataagttgtctagctgcttcagtaagtctcctcctctgtatgtattgatggatagtacatcctacaacatttgtaaacattctgtgtaaatggtattttgaataattagcaatataagctattttatctaaatttagattttctgtaagattttcttctatataatcaattatctccataataacatctgtatttgttttcaactctatcctctccttttaagtattataacctatgcaaaaagttttttcttaatataaattgctatcttaatttagtgtatagcaataaagtatcgataaaacaatatcaagtatttttatacaaaaatattaatatatatttcttttaaagtttaaacttaattacatctattatatgtagattgctacatgttttatctatgtaccttgattcatatgtattattttgctgagtatttttacacctttttcaatttcatcaaaactaagatgagcataacctagtataatttcatggtcatattctaatatattctcaattgcatattgttgtataggataaacttttatacctgcttcaaaaattttatgaattaaactttccgtaaatttaacattatagaaatgagcaactatatgaagccctgctgcttcaccttttattttaaattcatttttaaattccgtgtttaaaacttttatgagatatttacgttttctattgtacaacttcttcattctaaatatgtacttctctaaacctccatttccaataaattcagctaatacatattgcaatattgtttctgtatgaacatcagagtacatttttaaggttttatagctttctaaaatattgtctggtaataacataaatccaacacgaatagctggagataatattttactaaaagaacctatgtaaattactttatttgggctaagttcataaagagaactaattggttgaccctcatatctaaattcactatcataatcatcttcaattatatagtaatcattctctgttgcacatttaataagctctagtcttctttgaataggtaaaatccctcctaatggatattgatgagaaggtgtagtataaacaaaagaaatcccctttattgattttattaagttggtattcattcccttatcatctactttaattccaacaactgaatatccaatagatgaaataacctttaataagcctttatgaatagggtcttctacagcaacctttttattacttttgtataaaagctgtgaaattaaagataaaccttgtgttgaaccagaaacaatcataatgtttttggaattacatctaattcctctagtacgaaataaatacttagatatttccactcttaaaacccatacaccagctgtacttccatatctgaaatccgaatctgataaatcatacagtatttgtttatatagctttgaaagttctttgcgtggaaatagttttaattctggaactcctgaacgaaaatctatataatttttttgtttattagtatgtaaatctttttcatctctaaaagtatcatttaacttaaaatcaactttatgccctgatattcctttagctacaattgttccatatccattccttgtttccaaatatccttctgcaattaattgattatatgcatctaaaactgtattacgagatacagatagttcttttgataaagtcctagatgatggcagtttttgctcaaactttaagcttccatccagaatcatatcttttatctcacaataaatttgtcttgataatgatatattactatttctattaatcgtaatccacattctaatacctccaaaagtggttctataaaattactataaaaatggaactacaaaatccacttttaacttgctaagattatatcataaaatataaaataaaaaggagtctatattatgttagaaatatcacataaagttaaagaaatttatcccaatattaaatttggagttatggttataaatattacacattcaaaacctaataaagaaaattttttagttcttaaaaactctacaattaaaaatattatagaacaacacccagaatacaatcgtaaagaaaaaattaaaacagagcctgtttcaagttatataaagtattataaaaaattcaagaaaacttaccctgtattgcttcaattagaatctattctattaaaatcaaaaggtatcccagatgtaggtgtaacaattgagtcaatgtttttagcagaattgaaaaatcttcttctaacagcaggtcatgaccttgataaaatggaattacctttgaaaatagaattagcaaatggaagtgaacatttttatggtataggtggtaaagagcatattttaacaaaagatgatttatttttatcagataatattggtatattatctagtattcttaatggccctgataatcgaacagctataacaaaagatactaaaaatattatgtattttgtatatggacctgataaaatatcagaaaagcaaattcaagaccatttaaatgacataaaacactatatttcaagtgcttttccagatttaaaagttaattcaattgatatattttagttaatatattaaaatcctcataaatattttgaataaataaattagtgaagtatacattctagttaaactagatatacttcactaaaattaattatatgtagatattatttattttgaattttgtttataataaacactttattacatttatcctatgaataacttaattttataattaaagagtttcataagaaacaatttcacttaaaggaacacgagttttttcatgtctctctgggctctctggtatcttagattcatatcccatcaataatatatttattggttctagattatctggcaaactaaactcttctctaattatatctggattaaaatagcacacccaaacacttgccaatccaagttcagttgcctgtaacatcatatggtctgtaactatacttgtgtcaatatctgtaagttgtctcccatcaaaaggtcttgtccaaactttgtctttatctccacatacaagaattgctaatggagcatcatatatattggcagccttagaaagtttatttataccttctttttcctgaataacaatcaatctttgaggttgacgattaccaccagttggagctattcttgcaacatctaaaaccttctcaagtttttctttttcaacctttctatcttgataattacggcaagaatatcttttttttgtaagttcaacgaaattcatttatttaccccctattgttttattaggctaagttgatgatttatttaacctatgctataattttatcactatggtactatattacaataatgcacttttttgtaatatagtatctaaaaagatactttaaaataaataaaggagctcaaaaatgaaaaaatgtttagataattacagttgcccaatagaagcaacacttgcattgattggtggtaaatataagacacttatactttggcatcttaaagacactatattgaggtttaatgaattaaaaaaattaattcctaaagcaacgcctaagatgttaactcaacaattacgtgaattagaatcagatggtttaattataagagtggtttatcctgttgttcctccaaaagtagaatactcgctatctgattttggaaagagtattattccaattttagattccatgtgtgactggggttctgattacttagaaagtctatagagcattacagtttaaatcccattgctaatttaacttcatccatttgttctctagatgtcaacatttctaaaagcttaaaagctacatgtggagctgtttctggacaatatgaggttataatatttttatctacaacaattggttcattaactacatttacatcaaactcacttaactgtctttgtcttttaccatttttcaaatgatatgtagtagctttacgattttttaaaacaccactttttccaactggcaatgctgccacacaaatagaagcgattattttttcttttgaattaaactcccttattagatttaaaaaagatgaatcatatgcttcatcataaaatccaaattcttcaaatcctccaggaatagctagggcatcataatcatcaacacatacttcttctatcgtcttatcaactaatacttgtatattaaatgtactcataacttgttttttaaatccacaagtcactacatcaatatcatgcccataatcgttacgagcccatcccataacatctacaaatacactaaattccatagtttcaaaaccttttgctaaaaaaactaaaactttcatattctattttcctcctaaaatataattaacactttactagtaaattatttaaaaaatatcttttattgtattaaattcttctttaattgtagataaaacaatggttgtattagctttttgaatccccccaatttccttcaaagtcactgatataaactcttcaagattacttgtatcttctgctaatacttttattaagtaatcatactctcctgaaatatgatgacattctaatacagtatcatattccaatatagttttcttaaattctttcatacttttagataaatcagtattgataaatataaaagccaaaagcttatattttgttttttcccgattaatttgaatagtgtacttttgaattaaatttgactgctcaattttccttatacgctctgagactgctggtactgataaattaatttgtctgcttatttcagaggttgaagccctactattcttttttagagaattaattatttttaaatctatttcatccagagctactcacctccttaattatttaatacaattttagctaataatttacattaagtaaataaatttaatcatttcaataaaatttaatacaaatatgttatttttccttaaaattttagttttctttaatcaaaacacatataatacttaaaattatttaagttgaattaatgtttttattttgtataatatattagaaccttaatatatcattgaaaattcaacaatactagacatatacttctacatgttgtaatatttatgaaaatagtatccctatatcaaaagtataaaactcataatcttaattttcccatagactataaaattttattggtagcgagtcttcaaataactttgtaatgatagatttactaaattaatataatatatagcaaatataactttcttattgactataaccaagtattatgataacataacttaagctataattaataaaacatattttaaataaataagataatccacaaagtacaaaagtacaatttaaatatagataaactagaattaatactaaaattaggatgtgaataattatgatttatatagaattagttaaacttgttagaaaacttaactctacacaaatgtatacgatgaagcgttgtgtagaggttaatctgaaagcttaaagctttctatcttcatcggcaaatataggtttagtatagttttttggctatgcttatttaaaattacctatttgccgatagatagtatagattttctggtcatagacaacaatgcttgtctatgaccttttgtttttccaaaagcagaggtcggcattttacaatgccattcctctgctttttttatttccataaattttttaataaaagaaaaggagtttgaattatgagtttattaaaagtaactaatttatcacaatgttttatggataaatcactgtatgagaaagctaactttgatttattcaaaggtgaacatataggtgtagttggccaaaatggtacaggtaaaagtacattaattaaaattttattgggagaagttgttccagattcaggagaaatcaagtggcaacctaatatcaatataggccatttagaccaatatgcagaaatcaatagagatacaacaatatcactctatttacacactgcatttgaagaactttataaaatagaaaaggaaatgaatttactctatcaaaaaagtgctatatctgaaaatgagcaatatctaatcaaagcatcagattatcaggaacaactaatagcaagtaatttctattctatagataatgaaataaataaaatagcaaatggtcttggattagattcaataggaatgaatcgtgttgttgaagagcttagtggtgggcaaagggcaaaggtaattttagcaaaattgctactttctaaccatgatgttctattattagatgaaccaacaaactttttagataaagaacatgttgaatggctctcaaattatttaaatacatttaatggggcatttattgtagtttcccacgattttgattttttagaaaaaatttctacaggtattcttgatatagaatttggtatgattaaaaaatatcatggaaaatattcagagttccttaaacaaaaatcacatttaagagaagattatattagaaggtatcaagcacaacaaaagaaaatagaaaaagaagagacatttatacgtaaaaataaagctggagtaaattcaaaaattgcaagaggaagacaaaaacaattggataaaatagaaagaatagctcctcctagttttacaggaaaaccaaatattcaattttcagaaattgaaatatcggctcaaaatgctcttactataacaaatcttgaagttggatactactattctttacttccaaaattaaatttttctgttgatggaggtcaaaaaatagttataactggttttaatggaatcggtaaatctaccttgttaaagacattagtcaaagatattcctcgtatatctggagatttccagttttcagaacaagttaaaattggttattatgagcaagatttaaaatgggaaaatcctgataaaaccccacttcaaatagtagcagataaatatccaaaattaaatacaaaagagattagacgtcatctagccagatgtggtgtgaaggaagagcatgtttcaaggagtgtatctactttaagtggtggtgaacaatctaaggttaaattatgttgtatgatgttatctccttgtaattttcttattctggatgaaccaaccaatcactttgatgcagagacaaaggatgctttacaaaatgctttgaaacagtttagaggaagtataatcctagtttcccatgaagaaaaattttataaaggttggattgataaagtgtttaatatagaaaaacaattagtataagtttatacacaatatacaatattatttaattgatatttcaatgcaaattttaatgttctagttaatgtttcactgcaaataaactaaaaaaattttattagaacataaagtacattaccaggatataaacttaatgaggctatctcaaaatagagatagacctcttcttcattgttgagataacgaaaatacatttgacttcacacataaaagaatgcctcattaactaaaaattcaacttgagacatcttcattaatattaaaatctattctaatcgattctattcacaagtttatatcctagtcctttaaccgttataagtattttaggatttgaggggttatcttcaattttttctcttatatgtcgtatatgcaccataattgtattgtcacaaatactactatatactccccatacttgttcatagagtctttcttttcctataattttatttacattttgagccatgtagcttaaaagatgatactcccttccagttaactcaatctcatttctatctttatatacacggtttccttctatatcaatagtaatatctcctattttaataactgcactatctgatggtacaatgctttgatactgttgtctacgtaattgcgctttaactcgaaaagcaatttctcttggactgaatggctttgttatatagtcatctcccccactactaagacctagtattttgtcaatatcatcattttttgatgataaaaaaagaatagaacagtatgaaaactctcgaatttttttacacacttctataccatctatatctggtaacattatatcaagaatgacaacatctggacatgctatcttacacagcgaaatagcatctaaaccattataagctttaataatgtttttaaaaccatcatttatgagtacttcttcaattaaatctactatatctttttcatcatcaacaagtaatatttttttattaaaatatgtatccatattgaaatctctccataaaaatttattatattctaatcttgcagtatcaatatcttgtttttttatattcactactcttgcttttacattactaatagtaacatctctaatagacaaattcaatcactatgaaaattaagataagtttctttaaaataaagtgtatgatacattaaaacctatagaaaattaatttcatccaaagtttataatattagactaatacacttacagatacagatacagattaatacaatagtaaaataaaaggagttgtcttaaaattgactttttctaatcaaactttaagttcaactcccttttaaacttttatatgttatttttattaattctttatatcaattataactttaattttcaatagtatatatctaccactaattgaattacttattaaaacataaaatatctacctaaactatttatttaatatctacatatatttatatctattcttatacttacatatacaaaaaatggttaaaaataaagttaaaatctcagcacttggtactgctaaccatatcccatttatatttaatatatttggcagtatcaataaacctatagttataaatccaaatgtacgtagaaaagataatattgcagagaccttgccatttgacaatgctgtaaacatagacgaagtaaaaatattatacccacaaaaaataaaactaaaagaaaatatataaaatccagaccttgcaatttcataaactcggcttcctctttgagaaaaaatctctacaatgattggtgaacatgatatagaaaagataaataccaataaagatgccactgaaataaataatatacaaatcttaaaaacatgatttaactgtgtattattttcacttccatagttataacttattattggtgcaacacccattgagaaacctatataaagcgaagttaaaagaaattgagaataaataattattgtaatagctgcaactccatcctcaccaattaatttcatcatcatagcattaaataaaaaagtagtaactgctgttgatagttgacctaccatttcagatgaaccattaaaacaagcttcaaataatattcttttatctagtctgggtatacaaaacttaagtaactctttattttttgaaaagaaaaccatacctgaaacggtaggaattaggtatcctactccagttgcaagtgctgctccactaatacccatttgtaacagaacaatgaacacatagtcaagaattatattagcacacccagcacctaacactagccataatccaaattgaggctttccagctgttacaaataaacattgaaataatacttgtagtatatttgcagaagcaaaaaccaagataataaaaagatatgaacgacaatatttaattaaaacttcacttgctcctaaccatataatgatataatccataaatacaatacctataccagtaattattaccccaattacaactcctgataatacgattaaagaaaaagctttatttgctccctcaatatcaccatttcccatcttacgtgctacaatagcacttcctccagtggcaagcatagttccaattccaactataagattaataattggacatacaatattaattgctgatagagcatttgtattaataaatcttgatacaaatatagtatctacgattgtatacaaccccataaaaatcatcataaaaatagtaggaaatgcaaacttcaatagagtaaataaattaaatctttgtgccagtaaattatcttgctcataaagattatcttgttcatgattttctgaataatatacatcactcattttgtttatttttctgtacattaattatttttaaaatatattccaaacaattagacatttacagacctcctttctgcataagaattatatctaattatttggatatagttttaattaatcttgcttttttacacaattatatttctactaaagaaacttttaaatccttactttaatcattttatagctttcagtgcctttagcgcaaatacttgttcacatagtttagtgtcatatgaaacgtatttatatatagttatacattgtctatttttactaatttattaactacttgcacttttataatgtctcatacctaacttccaaaatctccacataaacaatgtaaacaaaaatacaattaaaattgagtatattaatccattaattgttattgtcccagccaaaatttgagtcggaattgtcgacataattccatatggtaagattaaatagaataatactttaaaaacaccttcatatattacaccaggaattttcatattcattggcaataaattatcttctaatctcattatcgcagaagatgatataacaaaaaatgaaactgttctaagtatgatacatacatcataaaaaagtaatgtcatcaataacaccatgaaaatatatattattatcataactaaagttatctctgagtttaacttagatattccatataaaacaataagtatacttgctagaattaatggtgatgaaccaatattaatattttcaaatgttaacctaaatagtgggtctaatggttttgtaatatagtagtctaattctccttcttggatttttcgtggaatatcataaataccaaaaaagaaaatcgtcatatttatcgcatttattaatgagaaagttcctataaatattaacatctctccttgttgccatccccctattgagtctacatgagaatatatactattaaacattagaagttgtaatataaataatgaactatctacaaaaaatgctccaaaaaaatcaaatctaaataccatcatctttgataatttcatttttaataacataaatattattttcaaattttttttcatcatatacccaccccatcaaataatgttctcattcttttatacataactttatttactacagaaaaaaataaaacccataatgctagaataattaatccttgtattgcctcattgctgtttctacctattagtaacatagatggcaaatatgttgtataataaaatggaaataccttcataactgttactatagtttctggtaagagtacaagtggtatcattgttcctgtaataaattcaacaatattttcaattatcattctaaaaaaactaatctcaagaaatttaaatgacaaaatcccaataaagaagtggagtttcatcataaaaataaaccctagaaaaatcatcaaaattgaaattaatatttgaactggatttgatgtaaaggcaaaatctattttaaatataaaaatccatacaaatgcagaaatcatattaaatacaaaataaaaacatgtcattccaaaatttttagcaataaaataattttgaacattaattggaataatcatgtactttgaaaatgtgcccaattttacacgattacatatctcttcactggtactctttgacatatcaatacctgctaaaaatgagcttattatatagtaagacaacatagagttaaatgtaaaaccagagactattttattttcaccaaaaattgctttccataaaatataagcaaataaaatttttacaatcgtaaacaccatattaaccaccacatcaaatctccagataagttgcactttaaagttaattttggctacttcataataccttctaatactttgtttaaatttataaaacattgaataatttgaacttgcttcattatagttgctcataatactcatcacttcctttcttatatattctctctacaatactacctatatcttcttcttcaatcattacatctttaacatcatatttatcaaaaatccatttaatcgtttcatttcctctttcttttagcacaattactgatgtcttatgatttgtttgttcaacaactttacaatcttttggaaatacaatgttagtttcattggaaaaactaactgttatttttttatatttttgaaaatgattaaatagtttctctgtagaaccatcatatattttacggctattttctacaacaatacttctactacagagactcttaatatcttccatgtaatgagaagtaagtataatagtagttccttttgtttcatttacttcttttaggaaatacctaatttgtttttgggctatagcatctaagcctatagttggttcatccaaaaataatatttttggattatgtagaagggctactattaattccattttcattctttctcctaaagaaagcgtcctaacttgaacatttaaatagtcagatacctcaaataattcgataaagtaatccaagttttttttatattcttcattagatatatcatataattctttaaataaaagaaacgtatctgctggtgtcaattcaaagaatagttgacttttttggcccataacaacagcatattgttttttaaaattattttctaatttgttagggtaataacccataacagatatttctccagaagacggtgcaataataccagttaacatcttaataagagtagttttgccagctccattttgacctattaatccaacaaattctccttcttctatctttaaatcaaatgacgatatagctgttttttctgtatatttcctattaaataaagactttacactccccataaatcctgcctttttctcaaatcttctataagatttagtcagttcattaagttcaattatactcattttaactacctccatatttcataatttatataaaaaaagtccacaggtatatatctgcctttttctgtgcttatatttaacagcacaaaaacagaaaactcctgtggactagaaaaattaatgctctctatttcaaaatagttatcaaaataatactatacaaaattaataaaagtgtagcagattaaagcctactacaccataatttaacaaagtaatatatattttaaatactatttgttgtcatatgtcagttatctataaaggcagaataagacacaaaaattaaatgtattaaaaatacacttaaaatttctgattatacagaatatatgtgtctccaactatttaattgttggttaccattatataactccgacatcaaggcactcctctcataatattattattgatatcatatcataaaggttatttatgttcaagtatggatttatatactaatacatttagcttatttcttcagggttgaatttaaatttcatttataatattcgtttataaattaaaaatataatacgtatattaaaactggttattttactgtaatatttttattgtaaaagatatacttttacctatacaggatgtaatttctttagttctatattataataatattgtaataagagttcaacttataatacagtaaaatataaactgtaaatcttaagggggtaatctatggaaaataatacaatacaaaaacaattaagagatttatcaaaaaaaatttggcatatttatattttaaatccagaagaagaaaaccttaaatttattatttccttattagataacaaccttgcattaattggaacaggaaaacatgaattttacgaaacattagaagaatttattataggtcttgaaaaagaccaaacagaatcagagcaaatagactttgagattatagatgagtggtattcatgtaccaaagttacagacgaagcttttatagtatatggtactctttgggtaatagaaaaagattacctagaaaaagatatctatgtagaaatggatactcgatttactatggtatacagagttacagatgatatgattaaacttatccatgttcaccattctattccaaactttgaccaaatgaaagatgagtattaccctaaaacaataactgaaaaagcacaagaagcactagcaatggcaaatgaatttaaactaaaatcagaaaaagaccttatgactggactatacaatagacatttttttgaagtacacataaaagaaatgcttaaaactgtttcatatggatacttttacatctttgatttagataattttaaacaggtaaatgatatctttggtcatgttcgaggagatgaaatactaatacagttttcaaatattttgactaaagtattcgtaaatgatgctattattggaagacttggtggagatgaatttgctgtttttgaatatagtaatcaatcaaaagagaatgttgaaaataaagcaaagaaagttttagaattatgtctagagagtaattcttgttctataggtatatctaaattagaaaataaatctgatactttccagtctttatacaaacaatcggattatgctttgtattattcaaaacgaaataataaaggaaactttagttggttttagtacaaaagatattaaaataggcaaatttattagagtatcttgtcctatatactaataagtaaagtaaacaacaagctatctttgcatatatttatataaaccaactattcttaataaaactacaatagtcaacatgaccactattatagaatataataaactaaaaacattattaacatgattaatattatattttaataattttatttttaaaagtaagtccaaaatgttatattttttgattaaaactgatgttgatataaaaaattttacttaaaaaaacacttagaaaggctttataaagagccttttttgcttttattgattaaattttcatataaaattccttattaaatttcaaatcaataaaaaaaggctctttataaagcctcccctatttttattgattaaatcctaatatagacaatgccttagcatcatagtaagtagtcatctctcttgttgcatcctttaatttacggtaatcaaagtctaatgctccaccaaaagctgatatttcagacccatcagacctataccatttcccatcaatttgtatatagttccaagcatgatttaatgatggatttaatatagatagtgaatccattcccattaaccttgttaataaatgaaagctacttgcaaaacttccacatacaccacgtttatcaaccagattaccatagactatgttacaatatttagagtctacatattttgcttcggttaccaattttgcagctctattagctctttccatctcagatgcatttctccagtcaaaactatttaaaaaattcctgattactgtaagtgtatcttgagcttgtttgtaagaaatccaatctccatcggctattacttctatagggtcaagttttccaaagcctattctctgatatgagctacctgacaatgctgctgcataaaatcctagcccttccatacccttatttatataataatatttaccatctgctcgaagctcaactccatttggatttcctccatagagtaaattaaacttatttttttaaaacatattgtttaaatcagtacatttatatgttttttttgttcatctgttttatcaaatatattagtctttgaattttgtttgtattcttcagcatctttatctaacttttctattctcgactcaagtttcattatttcttcttgtgttaaatttataaaatttttaagcatattttcaagctcttcacgagttttacctactaaagataagtcctcagatactttctcttttttattagaatcctctttataatcctttttttgttctaactcttctaatttttcatcatttaatatttcttcttcaattttttcattagactctttagtgattaaagattctttttcatcatttgtatttagataagttgaattttcatctaacattgtacttttatttttatcttctataatgctatttttaatacctatttctatattagaaaagttattagttgtttctcttatttctgatttatataagttcttaattgcttcatttatttttttagtataaacctcttgtctatattttaaatctctaattctatcattaagttcttgcttttgtttcataatattagataaataagtgtcttttcctacagtttcatttttcttaaccatactttcatttattcttgtattatttatattactttcatgtctaaatgaatattgacttctatattgactagatattttcatttatttcacctctctaaaataaatttatgtttataaaaaccaacttaacttaattatattttatcatcaaaagtatacatttacaaatattagttaatagttttataggttcgagcattgttttcaacaaaaaatttttattataaattaaaacaataatttttataaatatcttatttgtattttataattcatatatttttactttataaattagcaatattgcagttttgctcttaagaaacatctctatcatacataagcatatactctattatgtattagtataaatatgccttttcttatcttacataagacctctttataaaggagactatcgtaacaaatatgtatacattatcacatatatatatcatcatataaaaaatcaaactttattaaaaaaattaataaattgctttaaataataccacaaaccaaatttgccatcaaaatcacattaaagtaacaaattaatggcaaatttaatacattaatagtatatagactcatagaatgaacaaaaaaactacacttatcttctaatcgtcttatttatttttgagatatttttaaatttcttttctttttttgctaagtattcgcttttattgtctgcaaatactgcttcagttttaagcctacgataggattcccatcttttaggcgaaagttcttgatgagcaatagcttcccagatagcacagcctggttctgaggtgtgagtacaattacgaaaatgacattttccgaaataagcttctatatctgcaaaacttttatctaaaccttctgaaacatcccacattcccaactctctcatacctggtgtgtcaataacaataccaccacctgaaattaaaaatagctctcgtctagtcgtggcatgtcttcctttatcatcatctatgcgaatttcctttgtatttaaaaattctcctcctagcagacaattaattaatgaagattttccaactcctgaagagccaagtaatgcaacagtacagcctgatttgatatacttagaaatctgtttataaccatctggctctatagatgaggtaactactacatctacacccaaggctatagaattaactacttgtaatttacgatgcacattgtcacataagtctgatttagtaagtactactactgggatagctccactttcccatgttaaagacagatacctctccaatctatgaatgttaaaatccttattcagtgacatgcacaaaaaaacaatgtcaatattagctgcaaccacctgttcctcatttacctttccagcagccttacgcacaaacaagctttttctatgaagcacatgatgaataatagcattaccatttttattattgcaacgatccaacataacgaaatcaccaactgtgggaaaatcagattgtatagtagcctcaaaacgcagttttcctgaaacctctgcaaacagtacaccatttacacatacagcttgataaaagttcttttcctgcgagataattcgagcaaggtataaatcgtgatattccatactttgagtaataaaattcctatttagaccatagtcttgtaaattgatttgtttcataccattcattctgtttcctccttttccaacttttcaatgattctttctagtgggaaagggggctgtgccagtggttttaatgcaattgacattaatttcactgaattatcatcagctgcaatacgattagaactaagatgtccacagcgtgtacaacgatgaataattgcccactcaccattttttctcacccacactccaataggttccatattagcatcacaatctgcagcacggtcaccaggaatgatatctacatgaagactatgtaaacaatgtggacaatgatttctatgttgtgtaccagctccttcaggaactacaaggcaaccacaatttttgcaaataaagttatccatacaggaattttcctgataataagctcgttttctatttttataattcatttttatttcctccgtatcttgtattttctacaaaaaaagtccacaggtatttatatctgcctttttatgtggtatacatatttacctacacaaaaacagaaaacccctgtggactagaaaatttagtatcttctatttcaacataattatattcaaaataatactgtgtaaaattaataaaagtgtagcagattaaagcccactacaccacaatttaacaaagtaatatgtaatattattatttgttgtctaatgttagttatctataaaggcagagtaagacacaacaatcaaatgtatcaaaaatacacttaaaaattctgattaaacagaacccatatgcgtctccaactatttatttgttggttaccattatatataactctgacatcaggcaagacactccttcactaataattattattaaaattttatcataaaatataagtatgttcaagtataatttaatatattcatatatttatgtttgtctcattttcttattctataaaatctagtggtattttaaaatttaatgttcacctagtattaataataaaaattaattgctattatttgttttctcattttatgcctattgctcaatttatctcacttaaattaataacaactgtcttttcatacaaaacctacaatcaagtttttccatatattctacatgaatagtctattttttttatataaaataacgttcatatttgtaaatttatttaattttcaaataagtatattgaataataagcaattctattgtattattgtaattgtagaataaaactaaatcggcaaaactagagaaatttagtgacgcaaagctatagggactaacgcttataaaataaactatgagttatgtcagccagttgccaaaaagagatattctttttgtttttatgaaagttttttagggggataataatatatatgtttagagataaaatggatagatgtacacatatgttgactgcttatattggtagttcatatgattattgtgattttatagatacacaactagatgattttatactagagtacggagaaaatgtggtagaatcttgtttgcatcaagtgatggtattagtaagtaagtataattaaatagatttggttttctagagaaccctttttagttttatctactttaaatagccttatgttagaaagctaattaagatagatttctagtattcataattttattttctatttaaaatacatataataaagatgtaaatttgtatcaaataataaatatgagaacttaaattctcttatctatgtgaaaataaacatctcttaaaatgaaattctgtaaacataaatgattttttagtttgaaggattagattaacaaaattataaatttgcaaataagctatattaaaaaatataataattttttatataacttattcttttataacttttaattttaaaagaggagaatgtatataagagtattcaatgtactagaaaaaatcaaaagaaatattagaagaaatggatattgagtaatcaaataaaagattttgatattacaaatgatatgtttcaagaaagcattcctatcacaacaaaaactattcttgaagacatgccttcaaatgatgaattaaatcatgttttttcaaaaggttgtgaacgaaaaatgaaaaagagaaaaattgtattaatcacactactattaataggtgttttgttattaggaagtatcctatataatctttttttagtaaaagcagctaatatttcaatgctaaaggaatcttggaattttgatataccaatacctaacaaagaaattgaagtatttgatactcaagatagtattaatggagatggacaaagttattttattcaaggattttctgaaaagaatttcaaaaaagtttttaatttaaaaggtggtatagttgtaagcaaagataatattaatgaaatagaaaaatatattgataaatttaaaagagattctgttaacattaataaaagtaataaaaataaaattgaagaagattttaaaaaatataagttagaagttaaaaaagatgataagtatatatataagagaaattatgaaaactatgtagttttaattataaaaaaagatgaacaaaaattatacagtttaatatggaatcagtaggtacatatgtattattaagaattataaataataaaaataaattttagtcaatctacaaaaaccttttaaattgtctggaaatcacctcctcatttgttataaaaacatacaacaaatgaagaggtgattttatggtttttaaaaaaataattataagtggatatgtgctttcacatgtttatcaacatttgtaatgcctatatttgctaatgaattataatataaaaatattaaataatattcaactatagattatgtaaattatcctatgaaaaaaataagttgtataaaatctggcaactgtagattgacgatttcttttaaaattacaattataataagttttatagaattaaaaataaaactttagagatttttgataacattgtagactaaatttgccaccgaaattactttacagtggcaaatcggtggcaaatacaatatattattagtatataatctatataaacattactattgcttgattatcttagctacagtttccacatgtgtagaatgagggaacatatctacaggttgtgcctcaacacatttaaatccgtgaacatttagatagtctaaatcccttgctaaagtagaaggattacaagaaacatagacaattctttccggattcattgaaacaatagtctctaataccttttcgtcacatccctttctaggtgggtctacaactactacattggcagtcttaccctctctatacatcttaggtacaatttcctctgcctttccaacataaaattcagcattatgtatattgtttaatttagcatttatcttagcatcttttatggcatcatctataatttctattccataaacctttttagccttttgtgccaaaaataaagatattgtacctatcccacagtaaatatcaaaaacagtatcagtatcatttaaatttgcatattcaagagccttatcatacaatactttagtttggacagggtttacttggaaaaatgataatggtgaaatctcaaacactaagtcacctatataatcgtttatttttccatctccatatataactatattttctcttcctagaatagcattcgtatctttttgatttacatttacaaccaaagtcttaaatccaggtatattttccttaagcactgaagctaattctttaagatatggaagtttgtttccatttgctactaatacaaccattacttctttagttgtaaaacctatttttgttactaaatgcctaatcaaccccgtgtgagtcttttcatcatatatacttaccttataggcccttatatatgtttttattattttaacaattttatcatttatctcatgttgtattacgcatttttctgtcgatattacatcatgagtcttctttttatagaagccaataattggaataccattattcttttgtattggaaattgtgctttatttctatatctatatggattatccattcctatagtgtcatgaacttctacatcctctaacttacctattctcgaaagtacttgtttaacttcatttgttttcatttcaagttgtttattataatctaaatcttgtatctgacaccctccacaatccctaagattgtcactacacactcttttcaccctgaatggagacttttctattatctcaacaatatctccctcagcataatttttctttactttattaatcctaactttaactttatcatgtattaatccgccctctacaaaaactgtaataccattgtactttcctactcctactccgccttgaccaatgtctactatatctacaatatacatctcgtttttcgaaagcataaatcaccctccaatcaatctattatatttaaatctttacaaacttttttctttaaatttatattaaaatattgctattaattaaactatattttttactaagctacaatattttattttaccaaaaaaaaaggagcttataaagccccttagtaaataaatttattatttttcttataaaactctagttgaacctctatataccacgcctcttgatgcatccacagttacaacttctccatcttttactagatttgttatatcagttgcagacacaataactggtatatctaaatttatacctacaatagctgtatgtgatgtcattccaccattctcagttactacagctcctgctttttctatataattgttcatttcagcatcagtagcagtagaaacaagtatgtcgccttcattaaagtctacacaagcatttccattctttattatacgaactttaccttctaccgtttgagtacctacacctataccttgcacgatttcttcgcttattacatgaacctttattaaattagtagttccacttactcctactggtactccagcagttataactactaattccccattatctatataatcagcttgtctagctgcctcaattgccttttctataacttcatctgtatttcctgcaacagaagacttaactggatatactccccatgtaagagctaatttattcatagtcttttcattatttgtagtagctattattggagattttggtctaaatttagataccattctagcagtatatcctgaagaagtagatgttattatagctgatgcatttaaatctactgctgttgtacaagttgcatggcttattgcatctgttacagtaacattgttagtaccattttcctttagtaatctatcataatctaaagtctcttctgttctttttgctattgtagccatcatttttactgcctctacaggatattttccagcagcagtttctccagataacattatcgcatctgttccatcatatatagcattggcaacgtctgtaacttctgctcttgttggtcttggatttcttatcatagaatcaagcatttgagtggcagtaacaactggctttgctaattcattacatttttttatcatcattttttgaactattggcatctcttcagttggtatctcaacacctaagtcacctctagccaccattataccatcagaaacttttaatatttcatctaggttctctacaccttcttggttttctattttagatattatttgtatatcagttgcattattgttctctaatacttctcttattgctagtacatcagatgcctttcttacaaaagaagcagctatataatctattccttgacttattccaaactctatatcacttatatctttaggagttattgctggtaaatttatcttaacaccaggtacatttactcctttatgatttttaactattcctgaattttcaacaacacaaactatatcttctccatttatttcttttactcttaagccaactaaaccatcatctattagtatagaatctcctgatttaacgtcttcagcaagacctttatagcttactgtacacatttctttagtccccataatatctttcatagttatagtgaacttttgcccttcttctaaaaatacctctgggtcttcaaagttacctgttctaatttctggacctttagtatctaataatatagcaactggcttatttaatttttctctaactttctttgccatatcaattctttctttatgttcttcatgcgaaccgtgagaaaagttaaatctacacacatttagaccattttgcataagttgagttaaaatttcctcactttgtgatgctggacctagtgtacaaacaatttttgtcttctttacattatttaacatatttgctcctcctgagatattattccacagatttatttttaatactaaaacttatatagataatatttttgccatctcataagcttctttatcaaatactttcttttgagctaaagcttcacttatttctaaatcaattattttgttttcttttattcctacaactctagctgattttccatctaataataattctactgctcttactccaagtctacttgctagtattctatcagatacagttgggcttcctcctctttggacatgccccaatacagtgactcttaaatctgctcctgactcttttttaagttccttttctaaatcactagcacttccgactccttctgctaaaacgattatactatgtctcttacctcttttttgagtagtctttaatcttagagcaacttcatctactgtaatttctacttctggtactattatagtttccgctcctcctgcaagacctgcatataaagctaaatctccacagtgtcttcccataacttctactatgttaactctttcatgagatgatgatgtatctcttatcttacctatagcatctataatagtattcattgcagtatcaaatcctatagtataatctgtatatgctaaatcgttatctatagttcctggtatgcctatagctgggaatcctaagtcactaagtttttgggctcctgcaaatgaaccatctccaccaattacaactaagcaatcaattttatactttttaagaatttttactgcttttaatctaccttcttctgttttaaattcttcacatctggaagattttaatatagttcctcccctgtgtataatatctccaacagaagataagttcatttcagttaaatcttcttctagtaatcccttatatcctctattgattccatatactttgcatccataatatattgctgatcttacaaccgctctaatcgcagcattcattcctggagcatctcctccacttgttagtaatcctatagttttcattttttacctccttggattttatgtcaattttttattataatcattgttattgtattctaatggactttttttgtccctatatcactttttaatcccatcaagactaaaaaaattaaatgtccttaaatgtccattttgtgatattatatcacaaaacggacaatatttttcatattattataatatatttagatttttatataaaaaatcaagcttttacttttatgttatctttaggaagtaactcttctaagttatttataaattcatcacatatacaagtcaatgccccggtcattttatatgctttacgtttaccatttatattttcatccatagggtacaagtatatactgtcattacctggatattgtttggctatttctacaatattattagttgtatcagtatcagacatactatctattttcaaatacaattttttaccactttctggcttaatattttctacatttctagttcttcctgaattgtagtttctatctgcaaagtcagtatcatcatttatatcttttatctctctagctataagttttgcattttcgccttcttttatacttaatgttccttttacatatattatattatcttcattcaaaatgacattatacttttgtaataattgaggaaaaactattatttctatagcaccatacaaatcttctaattcaataaatgccataatttcatttcgttttgttgttttaatagttttagttacaatcattccacccattataacatctgtttcattcatttgtaggtatgactcttcttcctcttttaatgaatttaattttccattatccatagatgttttttcttgtagttctttttcaaattgtgataaaggatgtccacttacatacattcccaagacttctttttcaaggttaagtctctctctttcttcatactcttgccttttaggtaaactgtatatttgttgaaaatcactatcttcctcactatctccaaaagcatcaaataaagaaatttgaccttgaacatttttctttctatccatagatacactttctaataaactttcataaccagccatcagactagctctattttcacttatattatcaaaagctccacattttattagactttctattactctcttatttgtatctttttggtctaatcttttgactaaatctactaaatctacaaataatccattagattctctttcagcgattatattgtttattatatttacaccaacattttttacagctgctagaccaaatcttatattgtcgccttcaactgaaaactttgaaaaacttttgtttatatctggaggtaatacatctatttctagtgctttacattctcttatatactcaactaccttatcagtatttcccattacactggttatcaatgctgccataaattcaactggataatatgtttttagataagctgtctcatatgctaaaaccccatatgcagctgcatgtgatttattaaatgcatatctagcgaagtctatcatatcatcaaatattttattagctatttcctcttctacaccatttctgatacaccctgcaatttctatattaccatcttcatcaaatttaccatgaataaaatattgtctttcttcttccatcacgtccatctttttcttactcatggctcttctaactaggtcacttcgtccgtaactataaccacctaaatctctaacgacctgcataacctgctcttgatataccaaacaaccatatgtaacttccattataggctttaatttttcatgtagatatgttacatcttttgggttgcttttattttttatatatgcaggtatagaatccattggacctggtctaaatagggatattcccgctacaatatcttcaaaattgtctggttttagctgtttcataaaacttctcatgccagcactctccaattgaaacacccctagtgtatttcctgatgaaagcatttcatatactttcgggtcgtcataatccatctttgaaaagtctattttttctgtgtagttttttataactctatttttttctattaaatcaagagtatctcttataactgtaagagttcttagcccaagaaaatccatctttaaaagcccaagttcttcaagtgttgtcatagtaaactgtgttgtgattgcatcttgatgtttgtacaaaggtacatattcatctacgggattttttgatataacaactcctgctgcatgagtagaagcatgtcttagcattccctctatctgttttgatatatttattatttcttttgtttccgggtcttggtcatacaattctttaagattaggatttgtatctagggccttatctattgtcattcctaaagcaaatggtatttccttggctaccttgtcaactttattgtagcctatatccaatacccttccaacatctcttattgcagcttttgcacccattgttccaaaagttattatctgggctacatggtcatcaccatattttctctttacataatctataacttcttctcttctctcataacaaaaatctatatctatatctggcatggatatacgttctggatttaaaaaacgctcaaataatagagagtactttattgggtctatatcagttatcttaagtgtatatgctactatcgaaccagccgcactacctctacctggtcctactataatattattttctttagaaaaatttataaaatcccaaacaattaaaaaatactctacataacccattttttcaattacatctaattcataatttaatctctctagtatctcattgctaggattatcatatctctcttttaatccattaaaacacaactcccttaaataagtttctggtgtatatccttctggaacatcatacttaggaagatgtatagtattaaaatcaaactccacattacacatatcagctattttcacagtattgtcaatagcctctaatgcgtatggaaataattcttccatttcttctcttgattttaagtaaaactcatcactaccaaatctcattctatttgggtcatttaatgtttttcccatttgaatacacataagaacatcatgtattttcgaatcttctttatttacatagtgaacatcattagtagcaactagtggtataccagtctcttttgataattttactaaaccagagtttacttctttttgctcaggtaaattgtgatcttgaatctccaaaaagaaattttcttctccaaatatgtctctgtagtcaagagcaaattgttttgctttttcataatttctattcattaaagcacgtgctacatctcctgcaaggcatgcagaaagtgctataatccctttgttatgttttttaagttcttccatgtcaactctaggcttatagtaaaaaccttctacgtatgaagttgaaactatttttattaaatttttatatccttccatattcttagctaacagaactaaatgtccttgatatttgtcatagtttgggtctttatctctcaatccacgtgcagctgtatagacttcgcaccctataattggctttattccttcttttatagctgttttgtagaaatctataacaccaaacatacaaccatggtcagttatagctattgagctcatgtttagttccttagccctttttataagttttttcaccctcgaaaacccatcaagtaaactatactcagtatgtacatgaagatgagcaaaatctttgttcattaaatcacctcctgctttataattttaattttaccacaaatatatgtcctaaaacaaaaacagagacttttatctcaaaataggaattaacttcaacatataccattatatgttataaattaatgcttattctgagattgtcccctcaatttattgctatgatttttttttcaaatctgttgcaatttcttctatttttctaagtctatgattgactccagattttcctattggtggttctaacatctctccaagttctttgagagtcatatcctcatactcgattctaatcttagctatctcttgtaaattttctggcaaactgctaattcctatagtctcttgtatgagcttaatattttctacttgtcttactgctgcatttactgttttagaaaggttagctgtctcacaatttactatcctgtttacattatttctcatttcttttactattttagtattttgaagacttaaaagagcgtggtgtcctcctataatactcaacaaatctgatatttgttcactctctttgatataaacaacgtgattattttttctagccacaattttactattaaaacctaaagagtttataagttcttttagagaatctgcaaactcctcattattagttacaaattccatatgatagttcttttctgggtcgcttatagaacctccaccaagaaaagctcctcttatgaaagctctcttacatccttcatgcttaattaagttctctgaaattttgtttatagtaaaaaagccttctttatcttcaagtatacctaacttttttaataacatttctgaacccatttcgcttgttaccattaatacataactgttatttctctttagcatttgattcttatttactgagattgtagtattgatattaaaattcttttttaataatttaaatactttacgggctattgaatttaactctgttgttatctttagatttagcttcttatatccaacgatttgtatacttccccctgatttaactagagctgataattcagctatattacaacattcattcccagatataactcttgctagttcatttttggtttcagttgaaaaagacatatctatcacctattaactaatttttctttaaccttttttttatttcttgtaaggcaacctttattatctccttttcatcatcatacctagctaggtctaccactctatctagatggataaatttagcatcaataaagccttcctctttttgtggaatagtatccatattctttgcttgcatcaaataccaaaaaactgttttatgaactgctctattttcatcccagttttctttgaatgtatagtgtatttcacctaaatatttcaatatatctgcttttactccagtttcttcacttacttcacgtaatgctgcctcttggttattttccccttcttctacttttcccttgggtaacacccaatctccattgaacttccttagtaaaagaatcgtattgccaaacaggactacaccaccagcactaacctcttctctcatcgatgttcactccttaaaactaacataatgataaggatttctacacaattttttaaaatccttttttactaacttttgttgtaattatgatttagggctaactcaataactatgttagatatatactttgcatcatgtcttatataattattttttatttcaattaaattcttctctacggtttttatacccatctcttttaatttatctttttgctttttatctaacaagacttgctctgctccatcttgtttatataagtcaagcatttcttctggcaatatctcattatttgcgattacataatctattaaattctcatcagtgtgctttactatagcattaacatgctctaatacattgtacccttctgtctcacctggttgagtcattatatttgctatatatacttttggagctacagacgatttaatagcgtctacaatcccctctacaagtaaattgggtattatactcgtatataagcttccagggcccataattataatgtcagcatcgtaaatagatgcaataacatcctttaatggtttgacatcttttggatttaaaaaaattttatcaatagagcttttttgaatttttgactcttcaggtatactagattctccatttattatattgccattttctaatttggcaactaaatttacatcttccaaagttactggtaaaactcttcctgttatagcaaaaatttcacttaatttatatacagctttttcaaagtttccatacaacccattcatagcagccaaaaacaaatttccaaaactctgaccttttaaaagcccttctgtaaacctatattgcataacttcattcattgttggctctatatttgcaagtgctaatagacagtttcttatgtctcctggtgggagcattcctaagtcttctctcaatacacctgaacctccaccatcatcagcaacagttacaattgcagttatattttgcgtagtgtgtttaagacctcttaaaaatactgattgaccagtacctccacctatcacaaccacatttggttctctattttcaacaatagacctttgaaatagttttactttttcattttttgcttttttatatataaataacgatacaattaatgcaatccaacctaaaattcctacaataataagtaatttagccatgtttgcctccattatcgcaacatagagtctctatgtttctttacaactctatatcccttattagataaatcctccgctataagatttgttatagtaactgacctatgtcttccacctgtgcatccaacaccaattactagatgttgttttccttcatctatatattgaggtactaaaaaatgaatcatatctaaaagtttcacataaaattcttcactgattttagaattcataacataatctctaacttctttatcatcaccagttttagctcttaactcttcaacataatagggatttggaagaaatcttacatcaaatactaaatctgcatcagcaagtataccatgtttaaatccaaaagatactacagaaatagttaggtttggattatcttcaccagaagaatatattttctttatttcttccttaaggtctttaggtttcatgttagttgtatcaattatacatgtagataactcctttaaaggttccattatctttctttccatttttataccttctggaatctgcatatcttttgccaatggatgatttcttcttgtcattttatatctctttaacaatacatcatcattacagtccaaatataccatttcatattcataattttctttttctaaataatttaagctttcatgaagcgcttcaaaaaactttctccctcttatatctatccctagagcaactttatcaatacttgaatttggttgataacataattctgcaaatttagttatcaaagcaggaggtagattatctacacaataaaatcccatatcctctaaagctctcattgtctcactttttccagatcctgaaagacctgtaactataacaaatttcattgctaactcctcccttttatcttatgtttattatattataatgttttctactaacgatatatccagattagagtcagatatagtcttcatagctagtttaaaatcaccaactctttctggacaatgtgcatctgagcctattataaatttattttctagcccttttattttatttaattgatttacattcaaaaaagaatggctactatttatttcaagtctagtatttgtcttttttgctgtctttgctacttcttctatatacacatcgcctttatctcctggatgagtaattataaaaatatcattattacttatcgcatttattacagcttttgtattgtattcttttgctttttcagttttaaaaatatagttattacaatgatttaataagcttcttaatgatgttggagtagaaccaaaatgatatccagccataatataatcaaaatctctaataaatttatcatccatatctatattgcctttatcatctaatatgttacactccatacctaaaagtatatttatatcattgtacttatcatttaaataatctacttcttctctcattttgagaatatcttttttctttacaccatatgcaatatgtttatagctatggtcagatattcctattgtttttattcctttagaaatggctacctttacattatcttcaatagtccctttgccatgactatataatgtatgtgtatgataatcagccagtattttcatttgttaatcctctccaagtattttgacttcttcttccaacataaccccaaacttggcatatacagcactttttataacatatattaaatccaaaatatctttagcacttgcttctccttgattgactacaaatccacaatgcttctcagatacttgtgctcctcttaaagtaagacctctcaatccagtttcttctattaatttacctgcaaaatatcctgttggtctcttaaatgtacttcctgcactcgcaaaatttaatggctgtttagttattcttcttgtcgctaaatcatccattaaactttttatttcatcataatttccttcttgtaattctagttctgctgataaagctatatatccgtttttcgatattatactttttctatacccaaattccatctgttcatttgataattcaaatatattgccttccatatccatcagtcttactgacttcactatgtccttcatttcaccaccatatgctccagcattcatggctagtgctcctcccaatgtaccaggtattcctgatgcaaactcaaacccttttaattcttgcttttggagagctttacctaaaactgataataaagctcctgactgagcagtcatcctagtatcatttatctcataagaattgaaattatcagctaattctattaccactcctcttattccaccatctttaattaaaatgtttgaaccatttccaattattaaatacggaatagattcttcttttaccaacttaagtacattttttaattgttcttcagttctaggtctaactaatatatctgctggtcctcctaccctaaatgaaatatgttttttcataggttcatcgacttttatatcctctttacttaatatatttaataaatttatatatatatcttgattattcattgtatttcctcccaaattatactgaactttagctgtcattattatttaaattacattagtatatagtattaactatattcaataatatatgattttgcttatcatatggattttatattttaagcttcttaattacaaactatattcaataaatatataataaagtaaaaaaaaaaaaataacaacatataaaagaatataaataatttaaaaaaagcatcaatatcactgatatcaatgctttaaaaggcaatttaattcgtattatttatctaactatttttgacatagcaaagataataaatccctccaactactatggaacctccaacgatatttccaagcgttacaaataccaaattagttataaattgaaccatagttatatttgctcctaatgccattcccattggtataaaaaacatgtttgcaacactatgttggaatccgcataatacaaataacattattactgtccaacatgaagccaattttgacattatatcttgagatgctgtagccatccatacagctaaaacgactaaaatattacaaagtattgcttttaaaaacattgatgctatagttgaattaaccttagcttctgccacagctatagcttttgtagctgcatctcctgtcaatgtagaagaataaaacacaagtgcaactagcagaattgaacctactaaatttgcaaaataaaccagtccccagtttcttaacatttttcctaatgttatttttttgtccataagtgcaatagccattaaggtgtttccagtgaataattctgctcctgccaccactacaagcataagacctactggaaagaccatagcacttaaaaagctagctacccctgggtctatcttgccaaaagtttgactaactatcatactccccaatgccccaaaacctataaatgctcctccaaataaacctaatagaattgcattttgtgtcgaaatgtttgcttttttaatgcctgcacttatagttgcttgtgcagtttccccaggtgtcaagaatcctttactcataaatccttcccccttaaaaattatactttcccttgtctttttatggcaataattatataataacaatatgatatataataaattttattaacataaaaaatatactatatacttatatatacttgtctcatataattatactatttattatataacaactttgttaatttcgaaataatttatattgaatttgaaaaatttaccttttgattatttattttactttttaattattgaggtattatatataatagatatatgtttgtgttattatatataattacttattttaataaatatttgaaggagggaattttatgtttgatatatcatttttcgaaatgtcaatatatgaaatagcagttactacaatatatataattaatttcatggttatactaaaccttatctttagagaaaaaagaaacataaatacaactttaacatggcttcttatattagtattgattcctgctcttggattcatactttatatagcttttggcagaaatatttcaaaaaacaatatgtttagattgaaagaaaaggatgataagataatcaaaagtaatatactagatactcaggttaaactccaatctacatctgaaattgattcagatatacatcaacataaggatatgatttatgcattggctaattcaaataatgctcattataccaataataacgatgtgtggatttatgctgaatctagtcaattttttaacagtcttcttgaagaacttaaaaaagctaaaaaatatataaacatacaattttacattttcaaagatgacaaaatcggaactgaaataatagacattcttatagacaaagctaaagaaggtgttgaagtaagacttttatttgatgcagttggtggtagaacactaaaaaatagtacactttccagacttaaagaaagtggtgttaaagttggaagcttcttcccatcattcttgaaaattgtaaactttaacttaaactatagaaatcaccgaaaaattgttgtcattgatggtaaggtaggatttgtaggtggatataatgttggtgatgaatatttaggtagaaatccaaaatttggtctatggagagatacacatactaagcttactggtgattgcgtaattgacctaaatatgagattcatccttgattggagatatacaactaaagaagatttagatttagaaaagtactttatagaagaagatacaaattctaatcatccttctgaaaatattgggattcagatagtatcaagtggtccagatatatcagaacttgatgagattaaatatggttaccttaaaatgattcagaaagctagaaagtatatatacatacagagtccttatttaatacttgactcaacttttatagatactttaaaaatagcttgtttatctggtgttgatgtgagagttatgattccttctaaacctgaccatccctttgtatactgggcatcatattcatatgctggagaacttttaaagtttggagctaaaatctacacttatggtcaaaatgcatttttacatgctaagacaatagttatagatgactctatatgctctataggaacagctaatatggatatcagaagttttgagcttaatttcgaagttaatgcatttatgtactcttcaaaaaaagcattggaacaaagaattatatttgaaaatgatattttaaattctaaggaaataacattagatatatataattctaggtctacttatataaaaatcaaggaatcaatttcaagactattatcagcagttttataaatcttttattttataaaaattttacattttggtttattttttaaagttttttatatgtattattttttttttattgaatttagctcattttttttattttttttaactattctgaattattttatattataatagactagtatagtttttatttttaataggtaacttttttgcattgtttttataaataaagaaattgttgtatattattctttctttattgttctggttttgttcacccacataatgttggggtcaactcatggttaattattttatgaaaaataataactttaaaaagaaaagggggatttgttatgtgcgattttatttcacacaacaagcaattatttgacgaactagatatatttattgactctcttacaacaaaggaaggtgcgttaatacaagttctacatgaagcccaaggtatatttggatatcttccaaaagaagttcaacttcatgttgctagaaaacttggagtagctcctgcaaaggtatatggggttgttacattctattcttattttactacagaacctgtaggtaagtataaaatcagtgtctgtctaggaactgtatgttttgtaaaaggtgctgacaaaatcttaagtgcttttgaaaaacagcttggcataaaagttggagaaactactagtgattttaaattttctttagagggtttaagatgtttgggggcatgtggtttagctccagttgttactgtaaatggtaaagtttatggtaaagtgaaacctgaccaagtaagcgaaatattagatacttatagagaattagaattgaattgttaagaggggtgaataaataatgcgtaaagtaaattcatttgatgaattaaaagttttagctgatgagctgaaacctaatcttagcttaagaaaaaattattctaaggaaaatgtattaagaagagaattacttgtttgttgtgatactggatgtacctcttcaaacagtctagaaatagttagtgaattagaaaatgaaataaagaaatcaggaatccaagataaagttagtgttcgtttgacaggttgttttggtttctgtgctcaaggtcctattgtaaaagtttatcctgataacgttttctacgtaaaagttgagccatctgatgctgaaaagatagttcaaagccacttaattagaaatacagttgtcgaggaattattatatgaggaagaatctttaagtaaaaaagttgaagaacaagaagaaatgtctttctacaaaaaacagttacgtatagctttaaaaaattgtggtcttatagacccagatagtatagaagaatatattgccaatgatggttatttagctctaggcaaatgtttaacttctcttactcctcaagaagttattgcagaggtaaaaacttctggccttcgtggtagaggtggtgcaggtttccctactggctctaaatgggaagctgcttcaaaaaatccagctggtccaacagataaaaagtttgttgtatgtaatgctgatgaaggtgacccaggtgcatttatggatcgatctgtacttgaaggtgaccctcatagtgtactagaagctatggcaatatgtggatacgctataggttctgatacaggatacatatacataagagcagaatatccaaaatctatagaaagattaaaagtagccatagctcaagctgaaaaatacggtttacttggcgaaaatatcttaggcactggatttaactttaaattagaattaaaatatggtgcaggtgctttcgtttgtggtgaaggtacagcgctaatgcattcaattgaaggtagacgtggtgaacctagaatgaaaacttatagttcttctaagagtggtctatggaaatctcctacttgcttaaataacgttgagacttttgctaacatacctgcaattatacttaagggtggagattggtttgccaacttaggtactgaagattctagtggtactaaagtctttgctcttggtggaaaagtagaaaatgtaggacttgttgaagttccaatgggtactactttaagagatattgtatttgaaattggtgggggaatccctgaaggtaagaaatttaaggctgttcaaacaggtggaccatctggtggatgtataccaactgaacatttagacactcctatagactttggttcattaagttctatcggttcaatgatgggctctggtggtatgcttgttcttgatgaatctgactgtatggtagatatagccaagttcttccttgagtttactgttgaagaatcttgtggtaaatgtacaccttgtcgtataggtactacaagattattagaaatattaactaaaattacagaaggtaatggtactctacaagatttagatgacctagaaaaccttgctgaaactatacaaactgcttcattatgtggtcttggtaaagctgctccaaaccctgttttaagtactcttcaatatttcaaagatgagtatatagctcatgttgtagataagaaatgtcctgctggtaaatgtcagaacttactttcttactttataacagatgactgtaagggttgtacaaaatgttctagagtgtgtcctgctggttgtataacaggttctgttaaggaacaacatacaatagatacttctaagtgtctaaaatgtggtgcttgtatagataattgtacatttaacgctataatcaagaaataacttatttggaggaggaataacaatgagtttagttaatttaactattaatggcaaacacgtttcagcacctagtggaacttctatcttagatgctgcgaaattaataaatataaaaatacacaacctttgtcatttacatatgaacgaaatagataagcttgacacttgtgcttcttgtcgtatttgtatggttgagacagagagaggcttagttccagcttgtggaacagttataaaggaaggtatgaaagttcagactaatagtgctaaagcattaaatgctcgtagaactattgttgaattattgttatcagaccatccacaagattgttttgtctgtgaaaaaaatggagattgtgaattacagactatagctgctgatttaggagtaagaaaaataagatatcaaggttccaaatcttttgcaggtaaagatacttctactaaatctttagttaaagaccattctaagtgtatattatgtagaagatgtgagactgtatgtaatgacatacaaacagtaggagcattatctggagttaatcgtggatttaatactttagttagtacattctttaactctgatatggttgaaacagagtgtacattctgtggtcaatgtatatctgtctgtccaactggagcattaacagaagtagataatgtacctaaactttgggatgttttaaataaaaaagaaaagactatagtagtgcaagttgctcctgctgtaagagttgctattggtgaagagtttggattagaaccagggtcaatctctacaggaaaaatggtagctgctttaaaagcacttggatttgaacatgtatttgatacaaactttggtgcagattttactataatggaagaagctactgaatttatagaaagaatccaaaaaggtgaaaatcttcctatattaacaagttgttgtcctgcatgggtaaacttcttagaacacaattatccagacaagttaaacttagcatctagctgtaagtctcctcaaggtatgtttggttctatagctaaaaactactatgcacctaaaatattaggaatcaatcctgaagaactttatgttgtatctgtaatgccttgtgtggctaaaaaatatgaagcttcaagagaagaattaagtgaatctggaatactagatgttgacctttctataactactagagagttagctaaaatgataaaagaagctgctatcgatttacctaatcttcaagaccaagattttgataatcctctaggaaaatctacaggtgctgcatctatatttggagcaagtggtggagttttagaagctgccctacgtacttcatatgagaagataactaataagactttagataatgtaaacttcactaatgttagaggtcttaaaggaattagggaagcaagtatagatgttgatggaactacagttaatgtgtgtattgtaaatacacttaaaaatgctagaaagattatggataaggtcagaagtggagaatgtaaataccatatcatagaagttatggcatgtcctggtggatgtgttggaggtgctggtcaaccttatcaccatggtaatactgaaatagttgatagacgtgcaaatgcgttatatgaaatagatagaaataaggctattcgtaaatctcatgagaatcctgatttacaagctatttataaagacttctttggagaaccaaatagtgatgtagcccataaataccttcatactcattactttgataagagttgtgtctatggagagtgtccacaagaatgtgcttgtgaagaagctaagtagtcataacaaagtataaaatttattcttaaaaaaggattgtcttaaaatacttttacgtaatttaagacaatccttattaatttcacaaattaaattatatttctaaatagacttattctttaattaacctatctattaattaaagaatacctgccattctcataagttgttttgcatttgtagttttacatcttccatcttttatcttatagtcaaaatgaattttatcgtctacatagtactctgagaaatgatagtttacaacttcaacatctccactacctgaaaggtcacatagctcaaagtcatgtgttgtcaccatacttataacccagggttttgataatttctttactgcctcacttgctccaataattctatcagcagagttagttcccttaaaaatttcatctactagaaccaacattggcagttcttttaaactatattgaatcattgattttattctaagaatctcagcatagaaagttgatattccttgacttacatcatcttgtattctcatagaagtaaatatagccatacaggtcgcatcaaaactcttagcgcatactggagcacctgcatatgccagcactaagtttacaccgatacttcttaaaaatgttgtctttccagacatatttgaacctgtgataatacaagtctgagaatttaattgtatcgaatttgctatgacacttttttctgctattaatgggtggtatacctcttcaactttcaatcttggagtatcttcatattttattactggaaaacatgtattttcctttacatgagaaataactgttaaacttattagagcttcaaattctccaatagattcaaaccaatctctaatttgatttccatatatacctttccatcgctccaaagcttctgcacaatgatagttccacatcaaaacaccacaggcaattatatatagtatctgattataccttaggtttacagcatttcctattgaatttaattgtttaacacctcttgaaactccacttcccttagaaagtttatcttgtaattctttcaaatatgcactctcaaacgtctctttttctaaaacctcaaacattttttcatatacttgtatacttctactaaatgaaaataatggagaaagagtttgcataagtcttggatatccaaaaccactaaaccctaactggattataaaaagtaaaaaaacaggtaaaacaggtaaaaatcctaacatacaaaatataaaagataagattgttgcagttggtagaccccaagtaaaaatatgcatccattttggtatatacacattcttattttctccatactctataaacgattctatactactatctgaattatttttttgctctttaccaattatattactgagtatttgaatatgaatagaaaaatcatcttttgataaaagttcttttatagccctctgtctttctaagattacattctcatctggattttcattccacaaatatttggctaaaaaatttttcccataagatgtattagctacacagatatattgatacaatgatgctcttccaaataagtctaaatcttttgcttgcgaattttcatcttttaagtattctttaccatctattttaaattccttccaaccatctccaaatctcttaatatacttatttaatacttcgctcttacttttaaaatatgtttcttcttcttttactttactatgaataactaagagtgctataaatattattattgataaaactccaacaaaaatacctactatatttttattgtaaaatccaatagcaaaccctgctatcactatcaaaaaagatattaatcttgctgtacttatgttatttgactttttacttaagagcaattctttttcagtactactttctaaaagtttactaaaatattctattcccataaaaaattccaactttcttgttatataatgaaactcaaatataaaattaatctagtattattataatctaacactgtactttaaattatccttatataatatatcttattaataaacattatatatatacaacttgattttaatttataaggtgtaggacataatcctaatcaatatttaattaaatgatgtgtagttcactattattcagtactacttagtatcgattaattttgataattttttagtaaattcttgagctgcatcgtatcccattcctctttgtctaaaattcattgctgctacttctaatatcatagcagtatttcttccaggtttaacaggtacaactaatttctctacattaacaccaagtatttcttcgtattctttatccagtcctagtctatcataatacttagtttcatcccaagcttctaaatgaactactaaatctatcattttagaatttttgattgcccctactccatataaacttctaacatctattattcctattcctcttatctcaagaaaatgtcttattagttcaggtgactgacccacaagcatactttcatctaattttcttatttctacagcatcatctgcaactaatctattacccctttgaatcagttctaatgctgtttccgactttcctatactactttcaccttttatcagtacacctataccataaatatctactagcaccccgtgaattgttgtgtgtggtgctaacttattatccaaatagtttgacagtctatttataagtctagtggtatttctatttgtgctcaaaagtattcttttatattttttagccttttcaattacatctggcttgatttccaagtctctagaaattattaacgctggtatttcatatgagaaaaatctatctagtacttcttctcgaatatgactatccattaatccaaaaaaattatattctgtctttccaactatttgtattctttcatatgcaaaataatcaaaatatcctgcaaactgtaatcctggtctatttatatcttgagagtagacataataatctacatcatcaggcatgtatactacttttaacttcaactcttttattatctctcttattgatactttattgctagtttccattaattttcttcctttctaaaaaaattataaacattatctgcaatgcttttattcattccatctacttctaaaagttcttccatagtagctttttttatagcctctacatctttaaagtgatttaataatgatttctttcttttttcacctattccttgtatatcatctaagatagattttgtcaaagctttatttcttagacttctatgatatgttattgcataattatgaacttcttcttgtatactagcaataaatctatataaattagttgttttatctagttctatttctttttctttgcatatcaatcctttagttctatgcttatcatctttgtacattccccaaagaggtatatctacatcattgagttctagtactttttttactgcactaacttgtccttttccaccatccaacaatatcaagtcaggtaaatttccatgttttaatcttctatctacaatttcagccatagaatcataatcattaggtccaataactgtctttattttatatctcctatattccttcttatcttttttagcattcgtatacactaccatagaaccaatcgaatctacaccttgtatatttgatatatcataagcctctattcttattggcaacttttctagatttaatatttgttttaattcttccaatgctccaatacttttttcatattttcttttattcatatcagaaaatttttcaagatattctacagcatttttcctaaccatttcaactaagcttttcttctctcccttttgaggaactcttattgttactttttgcccctttttagatgacagccattcttctaatatagaactatcttctatctcatcttctataattaattctttaggtatatactcttgttcattataaaattgttttacaaatgaacttaatatagaagctcttggactatccattacaccttctaatataaaatgttccctacctacaatcttaccatttcttataaaaaatacctggacacaagcttcattatgagctcttgccattgcaaccacatcttggtttaagtcacttacagtagcatctattttttgtttctgtatcatctcttcaaggctctttatcttatccctatatacagcagcctcttcaaatctaaagttcatagaactctcattcattttttcctttaaaagttccatcaatttttcttctttaccagataaacacattataatctcttctatcatttttccatactcttctttagaaacatttcctgtacaaggtcctaaacatttatttatgtgtagatttaaacaaggtcttgtcttattctttattgctttatctatatctattttacagcttcttattggatacgtactacttataagctccaaggtatcattcacagcagttatattggtatagggtccaaaatactttgccttatctttaagaactcttctaacttttaagattcttggataatcttcattcgtagttacttttatatatggataagttttatcatctctaagcactacattatactttggtctgtatctttttattaaattacattcaagtattaatgcctctaactctgaatccgttataatatactcaaacttatatatattcttaaccatagattttactttagatgtatggttttttgaagattgaaaatactgccttaccctattttttagagatatggcttttcccacatatattatatggtcgtatttgtctttcattaaatatactccgggctcagaaggtaatttttttaaatgctcttgtatatcaaacatctcgccctccaaaacattaaattttatactaaaattataccctaaaatatgaattttaaaaagttatacaatttccagtgctttagacaagttaaagtccatattcccttctataattgatttgaaaacaattttaaccatgaagagtaatatggactttactttgtattactatttacaacttatatttgactaatttacttataacaaaacagtttatcgtatatctgctctaaaatttttcacaatttatataacttaagaaaaatatttctttaagaattgacctgtataagaaccatcaactttagatacttcttttggtgttccagttgcaactatagttccacccttatctccgccttctggtcctaagtctattacataatcacaagtctttataacatctaaattatgttctatgactataattgtatttcctgtatctgctagtctttgtaatacttggattagcttgtctacatctgccatatgaagtccagtagtaggttcatctaatatatacaaagtctttcctgttggtcttttactaagttcagcagctaattttatacgttgcgcttctcctcctgataattgagttgaaggctgtcctaatttaatatatgaaagtcctacatccattaaagtttctaattttctttttatatttggtatattttcgaaaaactcaacagcttcttccacattcatatctaatatatcagatatagttttatctttgtattttacttgcaatgtttctctattgtatctttcacctttacaaatttcacaaggaacatatacatctggtaagaaatgcatttctatttttattattccatcacccttacaagcttcacatctaccaccttttacattaaaactaaatctaccttttttataacctcttgctttagcttcattagtagatgcaaaaatatctcttataaaatcaaatacacctgtataagtagcaggatttgaacgaggtgttcttccaataggactttggtctatatttataactttatctatactttcaattccttttatctccttatgcttaccagctctttgcttaagtctattcactttacttgcaacacctttgtaaagtatatcgtttattaatgtactttttccagaacctgaaacacctgttatgcatgtaaacttacctaatgggaactttacatcaatatttttcagattattttctgatgctttaactatttctataaaacttccatttccttctctagtagtctcaggaagcaatatttgttttttaccacttaaatattgacccgttattgagttctcattttcaattatttcatctaaagtaccctgtgcaactatttcaccaccatgtatacctgcacctggaccaatgtctataacataatcagcttctctcattgtgtcttcatcatgctctacaacgattaaggtatttcctaaatctgttagatgtctaagagtagttataagcctatcattatctctttggtgaagccctatacttggctcatcaagtacatataaaactccaaccaatgcagaacctatttgagtagctaatcttatacgttgcgcttctcctcctgataaagttccagcttttcttgataaatttaaataatcaagacctacatctcttaagaacatagctcttccttttatctcttttataatctcatgagctataaatctctgtttttctgtaagatttatattttccataaagtcaatcaattcatttacagataagtttgtaacttccattatattttttccatcaactaaaacagataaaacttcctttttaagtctcatccctttacactttggacatggtctctctgccatgtattcttcaatcttatctctcatgtaatctgaattagtttctctatatcttctctctaagtttactattacaccttcaaagtatgatttataatttctagttcctccaaattttgactcataagtaaactctacaattatattatctttaccataaagtaattcctccacaaaatcatctggtaaatctttaaacggtgttgtcaaagatacattaaaatgctctgctaaactttttatcattttactgtaataagtgtcatcattaacacctgttgaaccccatgctgccactgcaccttgttttattgataaatctttgtttggtactactaattctgggtcaacttctttactttccccaagaccattacaaacatcacaagcaccaaagggagcattaaatgaaaacatccttggagataattcttctatgccaattccatgttctgggcatgcaaatttagttgaaaaaagaatttcttctccatctattatttgggctattacaagaccatcagatagcttaactgcagtttcaattgaatctgctagtcttgattctattccatctttaattactattctgtccactacaacttctatattatgtttttgatttttatttaagattatatcatcactaacttcatagttctcaccattaactctaactcttacaaatccttcttttttgatattatcaaagacttttttatgtgtacctttttgtcctctaacaattggtgaaagaatttgtaatttcgttctatctggaaaatctagcattttatcaactatttcttgaatagtcatctgacttattttttcaccacatgtagggcaatacacatctcctactcttgcaaataatagtctcaaataatcatatatttctgttactgttccaaccgtagaacgtgggttttttgaggtagtcttctggtcaattgagatagctggtgataaaccctctatatattctacatttggcttttccatctgacctaaaaattgtcttgcataagcagatagactttctacatatcttctctgcccttctgcatatattgtatcaaatgccaaagaagacttcccagaccctgacaaacctgtaaaaacaataaatttatctcttggtaattctaaatctatattttttaaattatgttcttttgctcctcttattataattttatcttccataatgttgtttttacctttctatttttccaatttttcttctaattgtttcactttatctctaagttctgctgctctttcaaattgtaagttttgagcagcttccatcatctctgattttaatttatctatattagctcttatttcgtctttatcatctgtatcagatattccatatacaacttcttcctctgcaaccttagtagcttctatactatctcttatatttttctgtatagttttaggaattatattgtgctcttcattatataaattttgtatatctcttcttctctttgtttcatcaatagcattttgcattgagtcagttatcctgtctgcatacataattactcttccattttcatttctagctgcacgtccaatagtctgtattaaagctgtttcggaacgtaagaaaccttctttgtctgcatctaaaattgctataagtgaaacttctggtatatccaatccttctctaagtaagtttattcctacaaggacatcaaacttccctaatcttaaatctcttattatttctgttctttctaatgtaactatatctgagtgtaaatatttaacttttatccctatttctttaagatagttagtcaagtcctcactcatttttttagttaaagtggttataagcactctttcatttttttctatagttttagttatttctcctaccaaatcatctatttgattatttataggtcttacttctacaattgggtctaaaaggccagttggtcttattatctgttctgctattgtctctgagtgttgaatttcataaggtcctggtgtagcacttacaaacaacatttgatttatatttccttcaaattcttgaaaatttaatggtctattgtcaagtgcagaaggtaatctaaaaccattctctataagtgatgtttttctagacctgtctcctgcatacatacctcttacttgtggtatagtgacatgtgcctcatctacaattatcaaataatcatctgggaagaaatccattaaagtatatggtctttctccttctgaccttcctgtaatatgtctagaatagttctctatcccctgacaaaatcctatttcctttaacatttctatatcatacttagttctttgttcaattctttgtgcttctaatagcctatcattttccttgaaaaatttaatttgttcttgaagctcgttttctatttctacaattgccttttcaattctttctggcgttgttacatagtgagatgctgggaatataacaacatgatttctagtaccaacaatcttccctgttacataatcaatttctgttattctatctacctcatcaccaaaaaattctattcttattgctttttcatcattactagctgggaatatttctagtatatctcctctaactctaaaggtacctcgtgtaaagtttatgtcatttctttcgtattgtatctctattaacctttttattacatcatctctgtctctttgcatacctggtcttatagataacataagttctttatagtcttttgggtcaccaagtccatatatacaagatacagatgatattattatagtatctcttctctctaaaatagatgctgtagcagaatgtcgaagtttatctatttcatcatttatgcttgcatctttttctatataagtgtcactgtgagctacatatgcttctggttgataataatcatagtaacttacaaagtattcaactgcattgtctgggaaaaattctttaaactcactgtaaagttgtgctgctagagttttattatgagccattattagggtaggtttcttaacttgttgaatgatatttgccattgtgaatgtttttcctgaacccgttacacctaataatgtcgaaaatttctcatttctatttatagaatccactattgatttaatagcttctggttggtcacctgtaggtttgaagtctgattttattttaaaatccatagtatcactccttttttcgaacattagttcctgacatgtattattatatcatacctttataaaattgtttaagttattttaaatattttacccatttaaattttacttaaatctaaaacataaaaaaagacttctatctttgcaatagaagtctataattcatggaaaataaatactttattcaacttacataataaaatcaaatgcttctttttcaactccatctaattttaaatcaaacatttttaatatagttgctgcatgtgctctcaggtctccttcttctataaccacaccacctttaatatttggtccaaaagctataaatggaggtctattacctttagtaggtaaatgaccatgtgtcgcaacagcaaacttgtaatcttttatatctgaatcttttataatacttccttcgaaatcatttccaaatgaaattccttcaagaccttcaatcaccatttcaaaatcaccttcaagaccaaggttagatgcttcctctttggtaaaaatattctctatgaataattcttctttaaattcttcaagcagttctcttaattctgttaacctatctaagttatttactattatttgagctgatattccagaagaatttacataggcatcaaaatccttaacttctccattttcaacttttataaatccatttgatttaagcaagacatttggatttataactttatcaactctaagatgaccatggtccccaagtattataaaatttgtatctttgtatgtacctgcatcctttgtagcctgaataatatctcctagccatttatcattcatttttaatgctttatctacttcgtcattaaataagccataattatgtcgtgtatggtccaatgtagctaaatgtattagcattaaatctggtttatattcctttattatatctactgaacagtttactccaaataaatccatgttgggttctaatttccaatcaatataatgacaatgtctattgtaaataccgtccattataaccttactggagcttcgttcaaaagtttctcttgggtcatcttctctactaggagcccatatttctgcaatattataatctatatttggatttgctcccattacaggccataatacactagaggtagttagattattttcttttgctacatctataatagtttttacttttatgtcctttgaataccagtaccagtctttattttctttatttgggtcaaatttttcattatgatatataccatgttttttaggatatactcctgtaaccatactagtatgacacggatatgtcagagtgggataaacacaatttatattttttactatggagcaattttctagtatagatttaaagtttggtagattttttacaaattccaagtctttttcaaataaagaatctactgataatactataacctttgtcatttacattacctcttcatttatatattattgaatacttttaatcaacttacaagtctatataattatttatttgttttatctattactgcttgcattgcagaagttcctttgcttactacatcttttggatttgcatttaaatcagtaagcccctttttaatctcatccattagcttatcagttgcttccttgtatccatttaacattggaagtgcaacagcatattgtaattggtcagttgcaaccttatattgaggtttttctttatataatgtttgtaacttttctgagtttgttgcatcttcagttgttggtaagtatcctgttgatgaactaaactgaacgattttatctgtttgtgtcatccattctataaattctgcacttgcttctttttctttatctgttccaccttcaagcataactagattagctccacctgtaggagttgcgtatttttgattttttggtaggaatgctgttgatatttcaaacttaccttctgtttgttgcataagtcctgctaaatctgctgttgatgtaaatatcatacctactttaccatttacaaaatcttgttttgctacgtcccaggcattataatcttctccaggaggcattttcattattccagctttcatcatatcttgccagaatttaactggtgcttgtcctgcctcattattaaatgctacttttttaccattagttatttctcctccactttgcattaccatagcttcatagaaccaaatatctattggtgtttcaaaaccataagtatcttctgatttatttgtcattttactagcgtaatccttaagctcttcccatgattttggacctgaagggtcaagacctgctttagttgccatatctctatttatgtataatattggtgtacttctattaaatggcataccaacaaacttatcctcataatatgaatttgttaaaagaccagaaaagaatctttcttgatatgttttatcaaaatatttactcatatctactaaagcacctgctgatgcgaatgtacctgtttgagttatttctaataatgttacatctggttggtctttagatgttaaggctgcctgtagttttgttgcattttcatagtaatctttctgttttaacatatttacttgtacatccttatgttcactattaaattggtcaaccattttttgagcagtttctccattagttccacctaaaggagcccagaaatctatcttcgtaatattgctatcagtcttttctcctttagatgcatttgcatcattagaatttgaacacccaactaaagaacctaataataatgttattgctaatcctgttgctaattttcttttaagcttcattttcatcctccaaatttagtctttaattttttattttattcctgaatacataaaagcttcttttacttttttattcgcaaatatataaacaagaattattggtaaaattagaattatatttcctgccattattacattccatgcagtaattccttctgaagatttaaggagcgcaactcctattggtaaagttcttattgcatctgtatttgtcattactaagggccagaaataattattccaatggtatataaaattaaataatataaatgttattactgctggttttgccataggaaccattattctaaacattatttttaagtcagaagcattatctagtttagctgcttcaatagtttcatctgaaatctgcataaaattctgtctaagcagaaatatcccaaatgaagatgtcataaatggaattataagtggaatataagtatttataaatccaaacttactcatcatcatatagactggtagaaaagttacttgtggtggaatcataagtcctacaagcaaaagcccaaataacattttttcacctttaaatttaatcttagaaaatgcatatgctgctggaaccataactaaaaattgtaaaattaaaacacttcctgttacaaatacactgtttagtaaatatctaaaaaatggacctgaatgccatgctgtactataattttctaacactatatcatttggtataatagtaggtggtaattgcatcatttcttgtggatttttaaaggatgtcgatagcatccatataaaagggaatataaatattgcagataaaagtaatagaattaatatttccattgattttgatgctattttttttatatcaactttgtcttttttgataggttgtataatatccattgtctcctccttttggataaatcttataatatctactttttctttattgataatgaactttctttgataagagtctaaagttagcatatgtagcaatcataactatagctaacaaaaacatactcgctgcactcgcttgccctatgtcatagtatataaatccagactcatatatataataagataacatgttagttgaacccactggcccaccttgtgtcattatacttatctcatcaaatacttgaaaagatgcagttgttgttgttatcataagaaaaaatattgttggtgataatagcggcaatgtcactttaaagaaattcgttattttgtttgcattatctaatttagatgcttcatatatatagtttggtatggatttaagacctgataatactattaagatattgtatccaagagtcttccatattcctattagaattagtgacattaaagctgaactttcacttgaaagccactttgatgttggtaaatgtaatgtcgatagtatccagtttaaaaagccatattgtggctccataatccaaagccacaatacagctacagatactagtgaaattacatgtggtgtaaagattatactttgcgttaaattgtgtattatagaatttttatttagccaaacagcaagtactatggctagtgatatagatatagtcaccataaaaaaagtataaattgcagtgttcgttatagtttgtataaactctggattctttaaaagttctgtataattgtttaagcctacattttcaaaggttgaactaagaagactaccagatttgaagcttagagatatcgtcttaattattggatagactataaacaataaagttcctataatagcaggtgttatatataaatatgctttattaaattgctttttcataaatatctcctttaattttagaatacatacttttacatacttttacatcttctattctttctccatttttatcaaaataatataaatctttttctaatacacttattcttaaagttcttccaatatcaaatatatcattttccgttttgactcttatttctctattaagaacagataaacaatatatagtttcatttcccaacacttctttagtcacaacttttccaaataggctaaatacatcatcattttttccatctatgtttatactctctagtgttgctttttctggtctgaatccaaatttaatatcattttttatatctagtatgttcatacaaggactccctataaattgagctacaaataaattcttaggattttgatatatcttctttggagaacctatttgcattatctttcctttgttcattataactatcttatctgccattgacattgcctcaacctggtcatgagttacataaacaaatgtagattttagtttttgatgtaattgtattaattctgttctcatttgatttcttaatttagcatctaaatttgacaatggttcatccattaaaaatacctttggatttttaaccatagctctagcaagtgccactctttgtctttgacctccagataagttgcctggtttcacatttaaatattctctcaatcctactacatcaataacttctgttataagtttttctcttttttctttttctacttttttgtttttaagaccaaattctatgttttctctaacagtcatatgtggatataatgcataattttgaaataccatagctatatcccttttactagcatccgtttttgtaacgtcattttcttcaatttttaacttgcctgaagttatatcttcaagacctgcaatcattcttaatgtagtagatttaccacatccacttggacctaccaatactgtaaaagaaccatcttctatagtaagatttaaattttctataactgtattttttttattataagattttgttacattttctagtcttatatctgccatttttatcctcccaaaatatttaatttaattctacgatttacttatagattaataatactcttaatttgtaaaggatatattaagacaaagtgaatatatagtaaacttattaaaataaaggttaaattataaacattttttgttaaatatactgaagttaagatgatatacagcttatgttagctataattttctatatttttcatattcatggtttgctatcacaatgtgattttaatttatgaagagtcatataaaactatttattttttatataatttggtttgaaaataaaaaagacctctatgggggatagaggtctttaagtgggggagattgagtaatttatttttgctatattaagttttacaattatattatgtcccaaatttacaaggtttaaacataaaaaataaaacttttttaatttttataaatttacccaaaaaaaattacgtggctacgtcctactctcccaggcagtttcccaccaagtaccatcagcgctagagagcttaacttctgtgttcggaatgggaacaggtgtatcctctctgctattgtaaccacataatctttatgcttaatatttctattaagtttttaataagtttatagaacctagtaatactagtttctttagagttaacactctaaaaactacacatatatcttaatcaatgaacatcaaataaatattggtcaagtcctcgacctattagtatcgataagctaaatacattgctgcacttacaccttcgacctatcaaccagatagtctttctggggtcttacccttgcggtgggaaatcttatcttgaagttggcttcgcgcttagatgctttcagcgcttatccattccgtacatagctacccagccatgcccttggcaggacaactggtacaccagaggtacgtccatcccggtcctctcgtactaaggacaggtcttctcaaatttcctacgcctgcgacggatagggaccgaactgtctcacgacgttctgaacccagctcgcgtaccactttaatgggcgaacagcccaacccttgggacctactacagccccaggatgtgatgagccgacatcgaggtgccaaacctccccgtcgatgtggactcttgggggagataagcctgttatccccagggtagcttttatccgttgagcgatggcccttccacgcagaaccaccggatcactaagtccgattttcatccttgctcgacctgtatgtcttgcaatcaagctctcttttgcctttacactctacgtacgatttccgaccgtactgagagaacctttgagcgcctccgttaccttttgggaggcgaccgccccagtcaaactgcccacctgacagtgtcccaagaccagattcatggcctatggttagagtcccagtactacaagggtggtatcccaaggatggctccgccaaaactggcgtcctggtttcaaagcctcccacctatcctgtacatgtagtaccaagacccaatgtcaagctacagtaaagctccatggggtctttccgtcctgtcgcaggtatccggcatcttcaccggaattacaatttcaccgagtctgttgttgagacagtgcccaaatcgttacgcctttcgtgcgggtcggaacttacccgacaaggaatttcgctaccttaggaccgttatagttacggccgccgtttactggggcttaagttcactgcttcgattgctctaacagatccccttaaccttccagcaccgggcaggcgtcagctcctatacatcgtcttgcgacttagcagaaacctatgtttttggtaaacagtcgcttgggcctattctctgcggccacctgatggtggcaccccttatccctaagttacggggtcattttgccgagttccttaacaacagttctctcgctggccttaggatactctcctcacccacctgtgtcggtttgcggtacgggtacctttaacctcgatagagacttttcttgacagtgtgaaatcagctacttcgctactaaatttcgctccccatcacatcccagcattatcaaagcggatttgcctactttgactgcctcaatgcttgggcacacataaccaacagtgtgcttagcttatcctactgtgtcatcccttctctcaaacggttatcggtagtacaggaatatcaacctgttgtccatcacctacgcctttcggcctcagcttaggtcccgactaacccagggcggacgaaccttcccctggaaaccttgggtttacggcctgtgggattctcacccacatctcgctactcatgccaacattctcactcccatactgtccacatgtccttacggtcatgcttcaacccgtatgggaagctcccctacccatcattactgatgccgtagcttcggtagtaagttttagccccggaaatcttcggcgcaggatcactcgaccagtgagctattacgcactctttgaatgagtggctgcttctaagccaacatcctggttgtctgtgcaatcccacatcctttaccacttaacttacatttagggaccttagctgacgatctgggctgttgccctttcgactatgaatcttatcacccacagtctgactcccaagtataagatgacggcattcggagtttgatagtcttcggtaggtgcaataccccctaggacattcagtgctctacctccgtatctctcaccttgaggctagccctaaagctatttcggggagaaccagctatctccgggctcgattggaatttcaccgctacccacaagtcatccccgagcttttcaacgctcgtgggttcggacctccacgaaattttactttcgcttcatcctgctcatgggtaggtcgcccggtttcgggtctacgtcaagtaactgaacgctcagttaaaactcgctttcgctacggctccgcaccttaagtgcttaaccttgctacttaacgtaactcgttggcccgttctacaaaaagtacgcggtcacacaagaaatgtgcttccacagcttgtaagtgcagggtttcaggttctatttcactcccctcccggggttcttttcacctttccctcacggtactatacgctatcggtcactaggtagtatttagccttggagggtggtccctcctgcttcccacagggtttcacgtgtcccgtggtactctggatcatatctgaagtcttctcgtttaacatacaggactattaccttctgtggtgggtctttccaaacctcttcaattacgatacctcttcgttatgatatgtccgcaaccccaataaagaaaactttattggtttgggctaatccgcgttcgctcgccgctacttacggaatcgaatttctttctcttccttcaggtacttagatgtttcagttccctgagttcccctcattaagctatgtattcacttaatgatacttagacattactctaagtgagtttcctcattcggaaatcttcggatcaaagtttacgtgcaactccccgaagcttatcgcagcttatcacgtccttcatcggctcctagtgccaaggcatccgccctgcacccttaataacttgaccagttaaaaaggtttgatagattagaagctatcaacttcgataattttaaaaagttatcagctttatatattacaaattagatgtcatatcactaaatatatatatgcagttttcaaagtgctaaagcacggcgccaacggataaatcccgttgcttaaagtgctaacgcacaacgccaacaaacaaacttcacatgcgttcagtttattctgttgctaaaagtgctaattttgagtattcgtaaaaacgaaccctcaaaattaaacagtaggtaattctccttagaaaggaggtgatccagccgcaccttccgatacggctaccttgttacgacttcaccccagttattgattccaccttcgacgacttcttccaaaaggttagataatcggcttcgggcgtctccaactcccgtggtgtgacgggcggtgtgtacaagacccgggaacgcattcaccgcagcattctgatctgcgattactagtaactccagcttcatgtaggcgagtttcagcctacaatccgaactgagagtagctttaagggattagctccaccttacggcttggcaaccctctgtactacccattgtagcacgtgtgtagccctaagcataaggggcatgatgatttgacgtcatccccaccttcctccaggttatccctggcagtctctctagagtgcccaacttaatgatggcaactaaagacaagggttgcgctcgttgcgggacttaacccaacatctcacgacacgagctgacgacaaccatgcaccacctgtcaccaatgtccccgaagggaactctccgattaaggagatgtcattgggatgtcaagcttaggtaaggttcttcgcgttgcttcgaattaaaccacatgctccgctacttgtgcgggtccccgtcaattcctttgagtttcactcttgcgagcgtacttcccaggcggagtacttaatgcgttagctgcggcaccgaagggggtaacccccgacacctagtactcatcgtttacagcgtggactaccagggtatctaatcctgtttgctccccacgctttcgtgcctcagcgtcagttacagtccagagagccgccttcgcaactggtgttcctcctaatatctacgcatttcaccgctacactaggaattccactctcctctcctgcactcaagtctcccagtttcaagagcttactacggttgagccgtagcctttcactcctgacttgaaagaccgcctacgcaccctttacgcccagtaaatccggataacgctagccccctacgtattaccgcggctgctggcacgtagttagccggggcttcctcctcaagtaccgtcattatcttccttgaggacagagttttacgacccgaaggccttcatcactcacgcggcgttgctgcatcaggctttcgcccattgtgcaatattccccactgctgcctcccgtaggagtttggaccgtgtctcagttccaatgtggccgatcaccctctcaggtcggctactgatcgtcgccttggtaagccgttaccttaccaactagctaatcagacgcgggtccatcctgtactggctcacctttgatattcaagagatgcctctcaaatatattatcccgtattagcatacctttcggtatgttatccgtgtgtacagggtaggttacccacgcgttactcacccgtccgccgctctttaccgaagtaaatcgctcaacttgcatgtgttaggcacgccgccagcgttcatcctgagccaggatcaaactctcaaataaaagtttatcaggctcagatactattgttatcaaaatatctggctttatggtttgtttcttgttttataaattaacctactgtttaattttcaaagttcattttttatgtttgcccttttcttaaggacaagtaacactatatcatcttaaaaataatccgtcaacacctttttaacattttttattttattttttatatatcaaacttcttaagttcttctaggtcaagtgttaccaacatattaagcacatcttttcttttacttttatcttcgtatttttttataaccttttttcttatatctcctaatacatttaaatactcctcataatcttcagtatatctctcttcaatttctttttttatctttgatgataatgaaggactcttgcccccagtagacacacttataagtaaatctcctctttttatatatgatggaacagtaaagttcgatatttctatattatcaactacattcactagcttattttttgctctacaatataatcctatttccatatttaactctctattatttgtggcagcaattattacagaagcatcttttatatatatttctttataatcatcttttattatttttatatttccttttaaatcataaaatttatttaaaatttgtttagaaactatagtaacatttttgttaaactctaaaaaatttttacatttcctatatgcaacttctccaccaccaattataactacatctaactcatctaattttaaattaataggatatagcatcttctacctccaaattttatttagttacataaataaagtatagaaattgtaaattagtttctattattcttcaataaatgtctaaacaaaactactgtataatagttaattacaattcctatactttttgatattctttatactactagaatttattttttcaacagtttagcaatgtctttagcaaaataagttattattatatctgctcctgctctttttatagatgtaattgattcaagaattacatcttcatttaataaaccttccttcacagcaaacttaagcatagagtattctccacttacattataagctgctagaggtaagtcaaaattatctttaactcttcttataatatctaaatatgataatgcaggtttaaccataagtatatctgcaccttccaatatatcaagttcagtctctattatagcttcattgctatttgctgggtccatttgatatgtttttctatctccaaaagatggtgctgaatgagctgcctctctaaaaggtccataataatttgaagcatacttaacactataagccatgattccaacattttctaatccattttcatctaaagcttctcttattgcttgtattcttccatccatcatatcagatggagcaaccatatcagctcctgctttagcatggcttacagatattttagccaaatactccaatgatttatcattatcaacataaccagtatcagttaaaatcccacaatgtccatgacttgtatattggcacatacagacatctgttattacatttatatctgaatttatttcttttacctttctaattgccttttgaactattccattatcattaaaagcttgtgaagcacactcatctttttcatctggaacaccaaataacattatatgttcaattcccaactcacttatttcttttatttcgtcttctagcatgtctattgataaatgatatacatctggtaaagaattgatttcttcttttatattttccccctctactacaaacagtggatatattaaatcttctacattcaccttagtttctcttaccaaatttctgattgctttacttgctcttagtcttcttggtcttcttaacatattcaagcctccaaaattaattttttataattaaatctactaacgaatctatagtagatgtagcagattctttgtacaattttattcccaaactatttattgtctctgtagttataggacctatagatagtgtttttattttttctaatattttaatattttcttttcctataatttcaacaagattatttactgttgaggaactagtaaatgttatataatctatatcattagaatttaaaatatctaatatctcaccttttttatcctcatctattactgttctatatatatgtacttctgttacttcacaaatagccttaagtttgtcaaccagataatctctagcattttctgctctaggtataagtatattatcgttatcatttaaaataggagctaactcttcatacagtgactctgctacaaatttttttggtactatatccgctataattcctctttttttcaactcatttgatgtagcagaacctatagcacatacctttaaattagataatatccttaaatcaaaattcatttcatatatcttttcaaagaagatttctacggcatttttactagttagtattaaataattatacttatttatattttttatttcattttctaagttaatattattttgtattttttctaccttaatagtaggtatttctataggatttccacctaaatccattattttttctaccaatacactattttgatttctagacctagttacagcaatactttttccaaataaaggcttactttcaaagaagttcaacttttctctaagtcctacaacactcccaactactataagagttggcggttttacttcttctttaatagcagtttcataaacattctcaagtgtagatgtaacaactctttgattatatctagttgcccaacttataagagcaacaggtgtatccttatcttttccttctttcattaagttttcacttattttctctaggtttgaaattcccatcaaaaacacaagagtacctttgttatttgcaagagcattccagtttaattctccactatcatcacccttcaaatgacctgttattacatgaaatgacgaagcatggtctctatgtgttataggaatacccgcataacataaacctcctatagcagaagttatacctggaactacttcaaattctatatcttcatctactaaagtctctgcttcttctccccctctgccaaatacataagggtctcctcctttaagacgagttacaatttttccttctttagctttttctgctataattctatttatatcttcttgtggcaaaatatgattacttgatgccttgcctacatatataagttcacaatcaggcttagcttctcttaaataactactatttgctaatctatcatatactattacatccgattttcttatacactctaaaccttttaaagtcatgagtttataatcacctggtcctgcccctactaagtaaaccttacccttcataattctcatactccttcaatacaagtttagctaactttaaacctaactctctaggagaagaaatatctccatctatagacttgattactactttttttccttctgaatctccatataagccagtaagatgtattttatcttggattatttcacaataagctgccattggaatatgacaacttccatttacaccatctaaaaaacctctttcagccaatatttggatttctgtattctcatccttcagtgaatttactattccctctatcgtactatcattgcttctaatttctatagctaaagctccttgggcaggtgctggaataacaacatcaacaggtaaataagaacttattttatcttgcaaattagctctaattattcctgatgctgccaacacaataccatgcatgttttcatcttttatttttcgtatcctagtttccacattacctctaacttgtactatatttaaatcaggtctttgtttcaataattgaaacttccttcttttacttcctgttcctattactgctccatgaggcaaatcatctaaatttttatatccttctctaagtattagaacatctcttgggtcttctctcttaggcgtatgagcaaattttagtccatctgctaaataagaaggcatatctttcatactatgtactgctatgtctatttttccatctaataattgttgctctatttctttgacaaacaatcctttatcacctattttatccagtgaaacattttgaattaaatctccttttgtctttatgattttaatctcaaaactaatttctggatacttcttttttaattcatttattacccactctgtttgtataagcgctagagtactacccctagttccaaccactatattcatattaagtctcctttaaatattgctttcacctattttattttattatctttatttactagtatagtagaaaaataagatatcttatcttcaaggtgcgcttcttttaaatctgtaaacacattttcgctttcttgggaagaattacttactaaaatagcatgttctattaaatcatacttttctaatttttttattatttctttaaaatttttatataccttcatcaatactattgaattataattttgcaaagcatactctatcttatcatcttccatagtacaaggaattaccactaaagcttctttatccatgactaatggaaaattctgattagatgctatattggaaaatgatgaaattcctggtatagtttcgacttctacctctcctaatattcttttcattatatatacatatgtactataaatcatagggtctcctaatgtaacaaatcctacatttttaccatcattaacatctgatataatttcttgtgctacattgtcccaagctaaacttttttcattcccatcaaaactcattgggaaatgcctagactttatttccactgattcaggtaaatattcactaactattgataaagctagactatctccacccttttttgattctggagtgtatagaatatccagtttctttaaagtattaaccgcttttatcgtaagtaaagaaccatctcctggccctgctcctataccatagaacttagcattctctgcacattttacagcatgacgaacaaatttatcttgtatataagaattttctcctagtccttttaaatgaactcttacgtcaaatccatcttcttctaatattgttttccaagaatcttcttcatctcctgccatatcatttatagcatggtctcctgcaactaacataaatggcatcaaatttacagtttttatatttccttcttttaatcttcttattacatgttctatttctggatacccttcaactgtaccaacataagcatttattccattatccctaagcatgtattccaatgctggatacgctgaatgtgattcatgaagtgttccatgtcccataaatactactgcttcattactttccatatgaggaatttgatgcttaattgcctctacagcttcctgataatcttcaatatgtgtaagcaaaggtcttcctaatacaatctttttgaatttagaagaatatccatctacttgttcttttaatttgttaaattcttcgccacatataatatgaagtgtttggattattacttcatcatatccttgttcatatattttatctaaagcctgtattggattatctatttctattccatcccttttttttattttatttattatcatatttgatgtataagctctaaaaaaatcatggctttttaacgaattttttattttatcttcacatatatctattgtcttttctctcgtttcatgatagcttgtaccaaaactcactactaataaggctttcttcatatattctcctcctaaaaattacacaagtatgtctttaattttatttatgtcattaaatacattttcgtagttaatcgattctctttttataattattactggtatattgaaagttttacatgcatttaccttctctaagaacccaccagctattccactttcttttgttatgactaaatctatattgtaatgtttatatgtttcttcatttatatactggctaaatggacctttcatagctactatattatctgcacttaaacctaatttttcacaacttaatatgacttcactcgttggaagaactctaacaactaaatttttatcacttatttcctctataaatctgttcaaatttttacttcctgttcctatgaatatatttgtccctattttatttgctatttcacaggcttcttcaattgtatctactataaatttattatcataatctatttcttcaattaaagattttctctcaaaccttatataatctatattcaataattttgcacaagtaatagcagttttggatacttcaactgcataaggatgagtggcatctattatttttactatattattatcttttataaattttagcatatcttcttttccaagcttacctaaaattacattctctgcatgttgttgtgcaagttcccttccataatctgtagtaactgaaaggatatatggttgatttttcagttcatttatcttatcacatatagataaactatctgaagttcctcctaaaattaaaatcatactgtataacctcttggagttatcatcaattcaccattaatataggtagacttatttcctattataaccattgtagtcatatcgactttttcaaagtccatattttcaaaagtacatacaaacttttcttctttttctctacctacatcttttaccactccaacaggtgtatctccacctttaaactcacccattattttaaatgctttgcttagatgttcacttcttcccttacttcttggattatacaaacaaattacaaaatcggcttcagcagccaatctcaatcttttttcaattacttcccacggagtcattaaatcactcaaacttatatgacagaaatcatgcataataggagctccaagtatagctgctgcaccaatacttgcagtaacacctggaattacctttacttttatatcttcatcttctttagatattaattctaaaatgagacctgccatcccatatattccagcatcaccactgcttacaactgctactttttttccttttttcgcttcctctactgcttgtttacatctatcaacttcttgcctcataccattttggattatttctttaccttgtataaattcttctattagttttatataagtcttatatccaacaatagcctcagaatcttctattgcttttattgcttctaaagtcattgtatctttacttcctggtccaattcctacaacgtatatcatatttttattctccccactgaaaaagttattcctttatatttatgtttttcaactaacaaattacctttgctcaaaagatatgctataggttctgctactgaatacacgcccacattttttttaacaaaatcagatttatcaaaaagattatcaaccttagatatttcatctattgaaaatgttttaaatggcacttttagtatttttgataattcaattattgctttttcgtcttttttcagttctatacttccaactgtgtttattgctctaatatctatattttgtttattaagaaactcttcaagtgaattatacatcagctcactatctgtgtttcttctacagccaattcctatcactatatctcttggaattacctttattatttttttagtactatagcaatgttcaaatttattatctaagtttaaattctcaatatcttcaatacaatttattttattgcttactacaactaatttttctatatatgtgtttgaaaagctatctcttaactcatccttactttctataagtttaaatcccctagtatcaacttgatatccttcatcaacatataatccaacacatttattattcactagcatagaatttacttcttttacactttctctaaaattatcaatatgtgcatttagtttttttgctatcatatctaaggaagctttttgatttatatcagtagctgttgttattactggattagcatcaataagactacttatgtactgtgtcaagctgtttgcccctccaatatgaccactcaataaacttattacgtttttgcctttttcatccattaccaaaattgcagggtcactaaacttacttattatgtatggtgctatacttcgtacaactatacctgtagccattataaatattatgtaatcaaatttgctaaatatttctcctacaaaatcacttaacttcttttgaactgtatgtacacatgtttcttcaacaactaaattactttttttattttttacttgatatataacacagttatttactagagaatttatctttacagctaaattttttccattttctgtaatacagattatagcaatattaccctctatattcatgtttgaaatccttatcatataactttgaattattatactcttctcctaaaaatctcccaaccattattaaagcagtcttatttatgttgttttctttaacttttacagctatatcacttaaagttcctttaactattttttcatctgcccaagttgctttgtatataactgctataggagtatcttttggatatccaccttccagtaatttagacacaactttctcaatttcttgaacagataaaaatattaccatagatgtctgatgcttagcatatgattgtattgattctttctctggaaccggagttctgccttccattcttgttataattacactttgagaaatttctggaactgtatattcaacccctaaagatgatgctgcccctaaaaaagaacttactccaggagtacagtcataatctatattcaatttatttaaatcttccacttgttctctaattgaaccatatatagaaaaatcacctgtttgcagtcttacaacagatttattattttctataccttctctcataacatctattatctcttgtaaatccatatgtgcactattatgtatttggcaatcttctttacagtattccaaaagttcaggattaacaagtgaacctgcatatatcactacatctgcattacttaataatttgtatccttttaatgttatcagctctttatctccaggtcctgctcctacaaaatgtactttattcatcatcattttcccctttttcacaagatattatatatataggatttagtggtttaaaatattcaccttttcctagtttctctagtttagaaacattcaaaacacatacatctatttctttaaatccatgctttttaagcagttttaaagtttgattaaatgtatctattattataaaattagctacaagtcttcctcctgtaacgagattttttttagaccattctattatttcttccagattatttcctgttcccccaagaaaaatagactcaactttaacatttaaccctagattaattggagcatatccttttatcacttctatattttttaagttgaatttttttatatttttctctataagctctatagcgtcatcatttttctctatagatataacctttaaattaggataattatatgcagcttcaacacttacacttcctgtaccagcccctatgtctatgaggtttttagcatttactaaatttaacttacttattgatattgctctaacctcttccttagtaattggaactttacctgttataaattcactattcctcatctaaaatcaccacaacattcatatcaaaattgtccattcttattatctcttctggtttcgctattgttattttttcattgtcatatgacagattttctcctacaacaataattttatttagatttctatctattatttctctacttatttgttttggtcctatctttgaatctgtaaccatacatacttttttatgtgataatatgtaatcaaaatctggtattttgccatgactacttgtaatatatacatcattcatatctacatatatttttgaaaatatgtactgtaatgaactaatcccagaaaccacgtttaacatcttattatcaatatttttagatagatatctacctatcccatatattaatgggtccccagatgctattattgatatttgcttttctttattgttatttatgtactctataatttctcttaaattagaatccagaactattttttctccttcaaaattttttatagactctagatttcttttaccaccaattaatacatcagaagtggaaattaaattttcacctttttttgttatatagtctaagttaccaggtcctagacctattatgtttatcatataaagacctccactaaatcatctgtattatccgatttacctaataaagacttatccattgaaaatatgattacttccacatcaatatcatctgaatcttcattcaagtattgctttactctctccttacatttattacttaatatattatatacttctctatattcactattatttattagctctacagcttcttcagtagttacgcattgatttattttatttaaaaattcgtatctagctcccattaaagctaagtttgccactaatatctcacttctagcatctgctaccttactatgagtattaaaaataccagcagatacttttataaatttacctatatgacctgccattaagatttttttatatcctattctttgagcttctttaatcatatagcctataaaattacttaccctaactacatacttaatatctaagtttaatttttctcttataaactgttctccatgatttcctggaaccaatattattttatctaagccttgttcttttttcatctgaagttctatagaaagagacttcttccaaccctcatcactcataggttcaacaatcccagttgtacctattatagatattcctccaactatacctaatcttggattaaatgttttttttgctacagtttctccttgtggagcaaagattgttatttttaaaactttatcatttccaagtatagattcaaaattatctcctataagctttcttatttcatggtttatcattttaagtggagtcggatttatagcaggtttaccaacatccacactaagcccttttttcgtaaccacaccaataccagttccgccataaaccctaataaacttatagagctcacttttacactcactattggtgcttaaactatctatatcctttagagtaagataccctttgttcttatcatttttagctacaatttcagctcttgcataaatatccatggtatgagttgcatctatatcatctccaccatctttttttatggaacattccacaaatgtatcagaaatatttatattatcaacttttagtagtaatggtatccccttaggagtatctatatttatagtattgattctattttttgtaatcaacatatatacagcagccttagatgcacctgttgcacatgaacctgtagtatatcctcttctatatttttttccatctatatatacatattcttccatataggtacctacatagtatataatatagcatttactattgctgctgctaaattactgccaccttttctacctttagaaattatatatggtatatctgttttttcaacttcatcttttgattcttgtgctcctacaaaacctacaggaactcctataactgcatctaaatctaatctaccttctgatttcatctccataactttatataaagctgttggagcattacctaaaacgaatatttttcttccttcttctttagctgcaatttctactgctgccatagaacgagtaattcctttttctttagctaattttacagtttcatcatctgccactaaacatttatacttacatcctaatgattctaactttcttttatttataccactaagagccatatttgtatcagtataaatacttgcattattttttaatgcatctattatactatcaactgcttcttctgatatttttaatatatctaagtaatcaaaatcagcagtagtatgtatagctctttttattattttttcttcaatattattcttaaatttataatctggtctaatttcgtctattatttcttgtatcaattcaaaacttttttcttctattttcataggattctttatgtattccattctatttcccccttaattcctccattaattatgttttgtgtataaattttattatagacagaatttatgttagattcacataaggtatctatcatctttttatcattcatagacttatcaattaaaatacctactacagttccactgtgagcaatatttactccatatgctccatatttttttgatatttttattatttcatttaaatactcttttttttctatattctcatttgctaagctactcaaagtacaagcctctccaactagagataaattattttttttcaatccttcttctaaaagagcaaatgatttttttattacttctttattttctacttttaatttattataatcttgcctcaatctaattttcatagtatctagtactttgtttggttcaagtattataactttcgcattggtcagatttcctaggtattttataacagttccatttagaggattaaatatactatttttatctataaatatagaatctgttggttctatttctgctgctaatttagaaatctcctcactacttaaatctttatctatcaatgataatgttgcctttattgtagctcctatatcagcagttgaacttgccattccttttccaacaggtattttactatttatatttaaagaaatatttttagtatattttttaggtaaattaaatttttcaaataccttttcaattgctaaccttgacttatatctccctaaatttatatctactaatttttcttcaatatacacttcagaatacatatctattgcatatgaacataaatattcttcatcatcaattataccttgtacaaattctccacaagatgctgggcatattccataagatttcattttaatcacccaataaatttttcatattttctataagaattttgttatcttcatgagattttatagccactcttataaaactatcatctaatcctataaaattagacgcatctctaactaatatgtttccttgcttaagcaaatcttttttcaattctttagttgtttttttatatgctcttatcaaaataaaattagcatctgtatcatagacctttatatttcttatgtttctcaactcttgtaacatatattttctttcttctatgtaatattctttactatttttaatatactctttatcttcaaaaataaaattggatagtatatctgcaaaagaattaatagtccatggctctttgtgttcataaattttgttcataatttcagtgttgcttgtaagaccatatcctagccttaaaccaggcataccaaaaaacttagtcacagctttaattataaatatatttttatttgattctatatatttaaccaaactgtatttactttcatcttcaacaaattccatgaaagtttcatcaattattagtaccttattatgtttacctagtaaatgaacaagttcctttaaatcttggacattaccactaggattattaggattacatataaataaactatcaaatctttttatattttcttttattatatctatattaagtttaaagttattttctaaatctagctctaaatctataatatctaaattatttaactcagcacttcttctatactctgaaaaagtcggatttattatagccaatttttttttaacactcttcataagcaaataaatcacttctgttgcaccatttccaggtattataaagtctggatttatacctatatattttgatatattttctctcaagtttgtataatttatatctggataattcctacactcttctaatccttttaaaatgtatctctctaaatttggtaatacatttggatttatgtttgaactaaaatcaattatttcttttgggtttttcccatataatcttgccatttcacctacattggcaccatgccctaaatccttcatctatgtcccccttaagttagcaaacaataatttatataattaagttaattaaaatcatcctacataacacatgtattagtgtaaataccaacatagatacaaatgaagatacatacataattttattagttttaattatatcttctttatctatctccctaagcttatcccctattgttggcttatatactttttccccaaaataaacgttggtacctcctagttgtattcctagagcaccagatactgcgccttctgaaaaagcacaatttggacttttatgattctttctatctctaatagagattttaaaacagttcctatagttataatttaaaaagaaacttccaattgtcataagaataacagatattctagctggtatataattggctatatcatcaatcttagcagatgcaaaaccaatatctttatactttttatttttatatccaactgttgagtctaatgtatttatagctttataggccatagcaagtggtgctcctccaataaatgcataaaacataggcgcaattataccatctacagtattttctgcaacagtttctacagttgctcttattatttcaggttcacttaaattagtagtatccctacctactatataagatagctgaatcctagatttttctatatcttcggtttttaatacattataaatttttaatgcttcgtcttttaaacattttgtggctagtgttgtataaattataaaactattcactacaatactcaataatatattaaaactaaatagcttcactatagcataagttgttaaatatgttattccaacggttataaaccataatataaatcccccaaattttaactgcctatcatttttagagacctttcttattataccttgagtaaaatttataagtttaccaataaatctcactggatgaggaaaagaatatgggtctcctacaattaagtctgtcacatatcctatataaatagataaaatactcatttattcatttccttttttcaaaaaattttctatacaatttaagttattataaaaatgagtatgaagatatgtagccaaagtgtttcctttactataaccaccatcccactcttctactatatttccatctctttcttttctcattgaatatacacatttttcatcactttcaaatattgaatgatgaaactcatgccctttaatagattccccttttttagataaaagagtattttccttggctacaccaatacagtacccaaatctctttaaagaagatgtcatcttactaattccactaaatattccaaccatattaaattcttgttcttcttgattcaatagtttctcacctaggtacatcagtcctccacattctgcataaataggtatattattgttatgtgcttctaatatggaagttctcattgactcatttgcttctaattcttttccaaatatttctggaaaacctcctccaatataaatataatctgcatttggcactgatgcatcttcaagagggctaaaatagtttatttctaaaccaagttcctctaaaagctctatattttctctataataaaaattgaatgctttatcatatgctatagctattgatttattattaacatgttcttttattttattattttctatcaaagtttgaaaatcaaaatcactctcaaattcatcgctttctgatatttcaattattctgtcaatatctatatagtgttcaatttcatctgctaaggtataaaatttttcccttagtgatttcatttctacactaggaactaatcctagatgtcgagattctaaagagaatttgttatttggaggaaaataccccaatacttcaacattacaatatttttctatagaactcttaattatttgataatggctattagtctttacattatttactataacaccctttatatttacatctttatctaattccttatatccaagtaccatagcagcactagatgctgccatagatttaccatttataactaatataacaggtgactttaatacctttgaagtatgtgaacttgtacaattatctaaatctattccaaaaccatcatataagcccataacaccttctattactgaaatatctgcatcttttgaggacttatttactatatactttattttttcatcatctaacatataagaatctaaatttctagaatgtcttccagttataaaagtgtgatatgaagggtctatatagtctggccctactttatatggctgtactttcatatttctcttaaccaaagcttgcattattcctaatgatattgttgttttacctactccactattagtaccagcaattaaaatttttttcataatacacctcctacctaaattataaataaaggtcatcattatttcataatctcatatattttctctatatctaaatgttctcttaaaaaatcagccaacttatcatactctttatccttaaattcattaaaagagtttactttgctttctaattctcctaaaccttttttctttcttatattgtttaaaattgctcttgtaaagcttatttcatcaaatattccatgaagataagtcccaattacattcccctctttatttacacttccttcagtataattcacttctttatcaagttttttagttattaaatctaaacttcttacatcattacctcgctttgtaatgcccatatgaatttcataaccttttactttttttcccttaaggttattcatgtattcactgatacattcaacaatagtagcctctacttgtgttgtagtcttttctttctcaaacgttgtttctgtatctaaaagacctattccatcaacttcttcaatttcactttcaacatgataagggtcttttaattttttacctaacatttggtatccaccacatatcccaaatatcaatttaccttgactatgtaaatttttgatttgcgattcaagaccactttttcttatatatgttaaatcgtctatagtacttttagttccaggtattattaatatatctggatttcctaaagattctccatagtctacatatctaatacttacatcttcttgtgtctcaaatatattaaaatctgtaaaatttgacatatgtggggttctaattatttctatgtgtatatcacttttattcatttttttcttaaatctcgtagttacactgtcttcatcttctatttttatatctgtataaggtactactcctataacaggtacttttatgatgtcttctagcatctttacaccatcttgtaaaagctctttttttcctctgaatttattgattattacaccttttactcttcttttctcatcttcatttaataaaagcattgttcctgctaatgaggcaaatacgcctcctctatcaatatctccgactattattacaggtgcatcagctatttctgccatacccatattagagatatctctatcttttaagtttatctctgcattacttcctgccccttccataactacaatatcataccttgaatttaagctattaaatgtttccttcaacacacctactaactccaatttataatcatgatacttagaagaaggcatttctcctacaactttacctcttacaataacttgacttttattattcccagaaggttttaataaaactggattcatatcagctattggctctattttcgcagcctctgcttgaaatacttgtgctcttcccatttctaatccttctttagttataaaagaatttaaagccatattttgtgacttaaaaggagcaacagtataaccatcttgcttaaatattctacacaaacctgctactaagacacttttacctacatttgaagctgttccttgtagcattatttttttccccactttccatccctccttgttaaaatttactaaaaaacaaattaaaaaaagtcctaatacttctaaagataggacttttatatatattaattaaaaatctttcaccccgaagacctcttgttttaaattaaattaggcaggtatcctggcttaacttcatcctacttctataaccttcccatcaaactgacagtggtatttatagtttcgttggtttcacagtagcgggggctgcaaaggcatctaacctttttcccttttaacatctaattaagaacctaattttaatctaatattctattttcattgctaattttacagatatattacaaacacagattgtaatgtttggttttgattaaattatatgaagtctgtaaaattcattttatctattacagcaaatccaccatcaatttctaaaactgtaatagatgcattatcaattttaaagttccagtgatacttataactaccagaaatcaaatgtgttattatatttcttattgttcctgcatgagaacatataagtattgtctttgtatctaaattactatcattttctaaaattatattatcaatttcttttgccactcttttataagagtctatcaaactttctccatttggatatctatagttgttaccttcttttatcattttttcaaactcatttggatatttgattttaatttcttcaaaagttcttccttcaaagtctccaaaactaatttctcttaaagcttctttttcttctatttctaataatttcaattttgatattttttctactgtatctttagtacgtgtagatggtgttgtataaaccttatctatgttttcattactcagatatctggtaattttatttatttgtagtttgccctcttcactaatacaactatttatatggcctgataatcttccttttttattatcatttgtcagtgcatgtcttattaatattaatcttatcatattatcaccactttttactttaaaaaaacataaaaattaacaaatatatgtaaattaaatatacaagctctgaaagttctattccacagcctaatatatctcctgttactccgtcaatttttttataaatatgttttttgaataatattataaatacaaaaaccactataatcgaacctaatactttaatcaacactatattaggtaataaaaatataaatttagtaataagagcaactatcaataatgtgtatattatagcagttattaacatacttgtagttaattttcctataaataaatttcccattcctttttctcttggtgtcacggttttatatgtcaataacattactcctaaccttgcaatcattggcataaaaattataatccacaatgaattattacttattatatcgtaaacgaatccaacctttaataaaagtacaaacataattgctagaagtgaatttgtacctaatcttgaatctttcattatttcaagcattttttctttatccctataactatatattgcatcaaatgtatctcctaatccatctatatgaagtcctccagtaattaagacaccagctagagttattattatagaagctataaatggttcaaataaaagcatagaaatccatcctattaaataggataatatacctatgacaaaacctacaagtggaaaatatactattgacttataaaattcatcatcaaatcctacatttaattttataggtatccttgtcaaaaactgtagtattaaaataaatcttttcataattgcatactactcctttatcttcatagctatgccactaactacaaaataaacttcattacttttcgaagctatatattgatttatacgacctacaatatcagcataaattctactaagtttattcccaggaacaattcccatacctaactcattcgttacaaatacaaagtatagatttgttttttctatttcttcaataagtttgacaacttgttcttttatgtattgttctaatttgtttatttcttcttgactagactcttctatatttagattgtgttcaaacattagattatttactaataatgttacacaatctagtataacagtttcatgttctttatatatctccttaattatggaatatatatcttcatatatttcataagtattccagtttctaggtctattctcttgatgtttttttactctatctttcatttcatcatcaaatggaatagaggttgctatataagctgtattattatttctgtcaaaacatagtttttctgcaaagttactcttccctgacctagctcctcctgttactagaataattttactcatcaaaacactcctacatattaaatttttatatttatcttcccatgtcaatttcatcaaaagttgccatatttttgtaagtatagtttgaagcttctattatatcaaatgctaaagcagctccacttccctcacctaatctcatatccatatttaatagagggtctaattttaatatgtctaatgctcttttagttcctgattctgctgataaatgagatgctatcatatattctctagtttttggatttatcttatatgcaattaatgctgctgcataagaaataaacccatcaattactactggaatcctattagcactacaacctaatataacacctgccattgagcctatttcaaatcctcctactttagataaaatatctactccatcagttggatttggattattaatttcaatagcctttctaattacttcagccttatgctttagtctttctttcttaagacctgcacctataccagtaacttctaacgggtcacaccctgaaattacagatattattgctgtacttggagtagtatttgctatacccatctccccaataccaataaccttataatctttttctatacactgctctgctatttcaatacctatctctaaacatctaatggcttcttgtttactcatagctggaccttttgccatatttgatgtcccttttcttatcttgtagtctaataccccatccagtttttcatcacagtttattcctacatctacagctacaacatctgcccctacaaatttacttattactccaactccacatagacctttcgaaaaatttggaaactgtaattttgttatattttgagggtcaggtgctacgccttcttcatatacaccatggtctcccgcaaaagcaattataacctttttacttgtgtcaaaattttcattgccaaatattcctgccaattgcatgcaaatatcttctatctttcctaagcttccagttggatgtataagcctatccaatctctgctttgttttttcaatagaagagttatctagggaatatatgttttttgatatactttctaataaactcattttttatcctcccaacatttttttattttttaaactctctttttagataaaaaatactcttattttctaaaaatttcaactttttctttttatttttacatacatataaaaattattctacattttatgttcatttcctttattttacattgtcaatttgcatacaattagatgctttttgtaaaaatatatttaaaagaactttaaggagatgatattgtggatgatttttctaagttaaaaagtttgtatgaagatggatatagatgtatttatcatgattgtgttgataataattatactatctatcttaagaatttttatacggaaggttcagaaaccatagaattaagtagtgaatcagatttctcacaattcaaagattatatagatggactcagaatgtcttaattattatgaaacccattaaaatagggagtttaacaactccctattttgaagtcacaattttttttataagctttaaaagttcgtctctatttacttctctttggttttttctgtctttatactcttgaaagttaacaacttttgtatttggtttttccataaactcacttcccatttaacattattaacttatcttaatatattttattctatacaatttatctatttccttctatttataatacaaaatttcttaaataatcccaaattttcaaaacaaaattttcaaaatatactaaaatctacctttcaaatataatatcaaataaaatttaataatctttatactttatagtataatatactcataaaatataataaaggagattttaaatgaatatattacaaaatgaaaatttaattatcgaatcaagcagttttggtgctgaactaactaaaatattttctaaaaaatacgacaaaaacattctttgggatggtaataaaaaatattggggtagacaatcacctatattgttccctatagtaggtaaactttttgataatgaaacaataatagaagaaaatttatatagcatgactcaacatgggtttgctagagatatggactttgagattgtagataaaggagatacatttgtatcttataaattaacagataatgaatccactttaaagaagtatccatattcttttgagctaatcataaactatacattaaatgataatagtattgaggtagaatggattgtaaaaaatactgactctaaagatatattcttttctataggtggacatcctgcattcaaccttcctttttacaaacaaaatgatttttctaaacactaccttgagtttaaaagtaaaaatgatgtagaaaaaatcaatttaaatggttcttttacagatgatataatacctattggaaaattaaaaaacttacatttaaatccagaagtattcaagaatgatgctttgatatacaccaacatagatgaagtgtctatatataataatgatggtagtaaatatgtaactatatctatggaagatttccctctagttggtatttggactccttattatagtgaaactaattctactgctccttttttatgtatagaaccttggtatggtcttgctgatagtataaattctaacaaaatttataaagataagaagtttattaataaacttagtaagggaaaagtttttactgcttcttacaatataaatatacactagataaaggttagctaacccgttcccaaaataataaaatatttttatataagttaatataagggtatgaaataatattatttaatattcctcaataatattccttaatcaaaaaatattactggaatacaaaattccagtaatatttgataactaaataatgtgtttttatataaaccatagatactttttttatgatttaacaatacatacttatatacgtttttttgattctatttagagcctcatttaatgtttctctaggacaccccacattaatacgaataaatccatctccatctttcacaaaataacttccaactaccatagttaagtttgcatgtctaaaaaattctttagattcttcttcatttctaaatacttctcttacatctatccaggctaaaaaagaagagtctgacttcatcactttggcttttggtatattagtttcaaagaaatcataaactatttcaaaattctcctctacataactagtcatagcatctagccattcttcgctttcattgtatgctgcaactattgctggtattgcaaatacatttggagaagttattgaattactttttagcctttctaataaagtctccctaatttttacatctcttattaatacatatgatgtttttaatccacctaagttgaagcctttattaggagatacgcagattatactatttttataaatttctggatgagcattccacaaagatacaaatctataatctttaaatattatatctctatgaatttcatcacttaccaaaattacattatactttaaacataactctgacacttgatatagttcttcttttgtccatatacgacctgatggattttgtggactacagaatataagtaatcttatattctcgtatttcatttgattttccatatcctctaaatctaaataatatctattgttatctaattttaatgagctacaacacaactttctattattatttgctacagcctctgcaaaagggtcataagcaggtgtatttatcaatacaccctctccttctttagtatatgcttgaactatataatgaagggttgaaacagtaccaaaagttaattttatccaatccttttctatatatacatcaaatcttcttttattccaatttataatagcatcatagaagtcatctcctataaaagtataactataatctcctactgatgctctttttaagatagattcttttatagcaggagcacactcaaaatcgatatcagctaaatccataggaattgcatcttcatttaagccgaatttttctttaatcacatggttgctccattttctacaatttccttctttacgatttaatactttattaaaattatatttcataattttactctcctaatattataaactctttggatgtcttattgagtggaacaccttttccatctattataacaatatcatcttctattctaactccccctacatttggaatataaatacctggctcacaagacattaccattccttccactaatatatcttcactatttggatttaaagtgggaacttcaccatctccaagacctataccatgacccagtccatgattaaaatattcgccaaatccatgtttatctataatttttctagccactttgtcaacatcacttgccctagttccttcctttattgactctattgcagataattgtgcttccaatactacatcatatatctctttaataattttaggaggtttacctatagatattgtacgagtcatgtctgattgatacccttgataaacaacaccaaaatctattgttatagcttcattcactttcaattttttgtttgtaggtcttccatgtggcattgcacctctttctcctgataccactattgtttcaaaagacattccacttgcacctttttttaatgcatgatactgaattagagctgatacttctagctcagtcatatcttttttaatttcagaaataacctcatcaaatacttcatctgtaatctcacaagcctttttaataagttcaatttcttctttagattttatagcccttagcttccataattcatttgttattaaattgatttcaaaaccttcattttttagtgaaagatactcttgtatactcatagcttggttttctattgctaacttttttatatttaattcttttaataactcaattatagttggtatataagaaccttgagatacaatcctttttatgaaaccagtcgtttttttatctgcttcatcaatatatctgccatctagaatttgataatttttatccttagtaacaagcacatatacaccactacctgataaagctcctatatatcttttagtattttttgctttaatcaaaagagcgtcaacacctcttttatagattaaggatactaatctctctattgtattattcataacaaaatattagaaatccaatcctaaatcatccaataagtcttcttcttctttagagaatatattcttagtttcttctttttgttttttattattttgttgacgttccattattttaaagaatggccaatataataaaactgctaatactaattgcaatgcatttgctaatatagaatgccaatctccattagttaaaaatccttctaagaatacccctacatatggagggtcaaatactggctttgctaaccatccccagtgcataaaaaacattggtagtgtacctattatagctccaccaaatacatgtggtataaacattattggatttaatattatcggtgctccaaataatattggttcatttatcccaaataatgcagggaataatgatacacgtccaatcttcttataggaagcattttttgataacatacatgcaattacacaacctatactaattccacatcctgtaaatccaaagaatgcacttgaagctcctgctgtaaagaaatgaggtattgtttctccagcttgcatagctgctatgttttcagctataaatgtaatcattataggtctagttataggactaaatactgatgaatgtattccaaaaaagaatatagtacatatagcaaagttaagtgcaagaactgaccatgggttatccatacttcctactaatggagataaaaattgagtaagtatctgtggaggtaattctccaaatacttttaatgaaataaaacgagcaactataaaagttccacaaactattatagtagtaggtattaattcaaaagacctagatacaaaatcaggtacattttctggcatttttattgtgatattcttcttattacaaaaattatataactccacagaaccaagccctgctatcatacctgtaaatagccctttagctcctaaatttcctatttctaaagctccatctggtgtaaatgaggctactaggaataaaaaagaaaaagttgatagtgcaacacaacctggtatatataatttatagtagttccccagattaaaagcaatacacatacaagcatataatcctattaaacctatggaaagacttactggtaaatccaatattgctgaattgttaagtatgaatttgcttattggattattttctccaagcatatttggaagtgctggaagtattgcaaatatacttcctaatattgtgaatggtgtcatagcaaccataccagcctttatagaaccaaggtgacgttgattgtcaaccttatgagctaaaggcataaatactctattcataaatgcttcaaattttgaaaacatatctaatctcccttttccctcattatttttattatccttgagctaattgatgtttcttataagttattaatgccaacttcataactgtagctccatccatttttccatatacatctttatctattactgcaaaaggcttattttttggctctaatattccttttaagaagtctattttatgagctatttgaggacctataagtactatatcccaatcatcaacttcactttctattgaatctgctggtatagctgtaaactcaaaatctttttcattgagtttagcactctcttttaccacctttttcatattttgcattaacatattagtagaaaatccacctgcacaacataataatattttcataataattcctcctaaagtttgtatttttattatctcttaaaagcatctaaacttttaaaagaatttttacataaataatctatttctacattacaattacttatcgagacaatatatcaaagcctctatcaagtcttttgctagctgagaagtcatatagtggtcttgagcatgtaccattaaaagactcattgttgggctttcaacatcttcatttaaatcttgagttattaattctgtctgtattctgtgagcctcaatatctattttacgagcctcctctattaacaattttgctcctttaaaatcttttgactttactttttttaaagcctcaaaagctttcgatttactctctcctgcagttgatataagctccattatttgtacttctgttgacattttcttattctcctttagataaaatttcttatatgtttatattgttcttcatcaaaatttaaaattaactgtgtatacaatcttataatgttctctaaatctttattacttactattgaaaatgcacaatgaccatatctaactggtacacaagttactacacaaggtttcccttcatttacgagatgtgcttctcctccatcagtcccacctgattcaaacatatcatgttgaagtggtatattatttttatcagcaatttccattacataatctatcatttttctactagggactagagtcctatctctatgcattagcattacacctttatcaatttgtttctgatttgtatagtctctcacaaactcatttttagcacatgctacatctattacaaatactatatctggatttattaactgtgttgatgtctttgctccccttattccaacctcttcactacttgtagccgcaaagtgaatattacaatttagattttctttcctaagttcttttaaaacttctcccatcacaaaacatcctatcctatcatcaaaagcctttcccactaatcggtctggtaaagtaaattcctcaaaacttgttgtatatgttaccatatccccaacattaatccctaggttatatacatcttcttctgtatatgctccaatatctgcatatatattttcagccttaccattattatatgtagcatttatgacagcagggattttctttccttcttttgttgtaattctaactttttgtacaaactgtgcaagaggttttactcctcctattgttattaagtgaatcataccaagtttgtctatacttctcaccataaatccaacttcatccatatgagcacaaatcattacgtttggtgcactctcatcttttattttagaaaagatgatactccctagcccatcacagataattttatcactataagcctttagttcttccaataaaacatgtctaacctcttcttcattagatgctataccatctgcttctgacaacctcttaaaaaactctatattcatgtctaacctcccagatagatttttaacttatacataaactcttcataagattgtgacttatttagcatgtctaccatatccttatttgccataatcttacttaaatatttagatatttgcttatgaagttctaaatttccctttattaatgaaatcatgaaaataattttgggcaccctattttcataaataatatcagtttgtatcaaagctactgatattatatttttgtttcctgtcatctcgattggatgaggtatagccaccccatttgtataaatagtactcaaatagctttctctttcccatacatctttgggataggttggagaacaagctccctcgtcaactatacattttgacatactatcaaggatatccttatacttagctttatcttttatacacctaaagtgattcttatcaaatagacctaatatatattgttttgggcttgatatatttcctatatggtctgcaaatctaacactttctttaatatctaaataatccaattcgtctaaaatttcatttataagtataactggagcatttatttcaaataaaagatttgttattgaaaaaatcaaatctggtgcaaattctattacagctttttcttctagtaatgaaaaatttcttatctcagcatttggaaaaatttctttaagtcttaaatttatcaaaaatgcactacctccaccagaagagcatattattgctattttatattttttattaaaattagcttcttctctcttttcaaaaggaacagcaatgtgagtagctataaaccctatttcatcttgacttatttttatatgatactcattttctatgatttttgaaaattgaatagataaattaaaaacagttggatactgttgacttattttaactgaaaaaggatttattatcttgtggttcttctttatacgttctattaaacatgcaatatgtaagtaaaataagttaaaaaactctttatcttctaaaaaattagagttatattttttatctatctctctaaaaaattcgaacataatatcttgaagtttattcttatcaatattctttatagtggctttcttatctttagtctttagttttataagctcctttaaataatacttttcatcataattaaggttatattttttatctctaaaaattttatctaataatttatctataattaaatcttctgtatataattttaaattgctagcatttcccactactctcatactaactcttatatacaatataataatttgtgctaatatttcctcaagttctgttaaatttgcttctaaatcatgttcattaagtacattttttattgtacttctaatattagctaattttaaattatctataaacttattcctgtactctgttatatttctattccctctaaaataactatccaccaatatactttgaatttctttaatagaaccttctattttaattccataatgagcctttcgctctagttttaattctgtatcctttatcttttcatctatcttttttaaatcattttttatttgggatgaacttactagaaattttttacttaactgttctatagttttataaccttcatttactaaaagctctactattatagactccaaccgttgttctggattttcaactaaatctgagggtaagtttcttagataatgctcgaatttatcttggtctttaatatttagaatatatcctaatttagacttatattctaatttaaaaccattacattcttttatagtttctatcttttttatttcatttctgatagttcgagtagatacccccaacttatctgcaaaataatctatgtttagataaccactactattttttaatgtttcaagaataatgcgttctctcatatccccacctccctcagtgttattattgtgttttttaaagtggtataaaaaatattttttataaaaacaaccttttctttttatttaagaattttatatcctagtatattttgattccaaaatttaatatacatattttataataataaaatatatagttcaatttttattatattttaattatatatgtaatactttaccaataaaagctgatatttttcatcaattaaatgaaaaaaatacaccatttacatataattaatataaatttttcatataacaaatatcctaaacttatctaaaataaatttaggatattttatttttatactctatttacagacccacacactttaatcttttcttttacaaaatccttcactgattgaagccctgctaatccatactttttagggtctataacctcagaatcttcatctaaaacttttttaacccctttactatatgcaattcttaattcagttgcatagttaacttttgcaatacctctttttatagcttcttttataatatcatcatgtattcctgaacctccatgcaatactaaaggtattgaaactacatttttaatttctgataacctatctaaatctattttaggttcacccttatacaatccatgtgcagtacctatagcaatagccaatgaagatattcctgttctatcgacaaactcttttgcctcttttggatttgtataatcattactattcccgccatctaaatcatcttcttttccaccaactttcccaagttctgcttccactggtataagagaaggactacatgcttttactactgatttagatatagatatattattttcaaagctttcatgagaaccatctatcattattgatgtatatccacttcttaaagctttcattgcaaggtcaaaacttgaaccatggtccagatgcattgctacaggtatctttactctttctgcagcaacctttgcatttgctagataataatcaagacctgcatattttacagtagatggagtagtttgtaatattactggagagtttaactcctcagctgcttctataacagcaattaccatttccatattttctacattaaatgctcctactgcatacccctcatcttgtgcctttttaagcattgatgttgttgttactaatgccacattgataccctcccaaattatttagttataatattttaatcttatcttttaatattcatatattgttacaccttttactactctatttactgttcctgtagctgatggcgtatctggcttatttccaacctttaccgatacaaacaatgctatagtttgtgcaaacaatatgtatggcattgcaagatacacatctggtaatttattatacttttctttaaactcaaactttgttcctgagaagttattttcattttctactgacactgcacaagtgaatttagcaattttatccctttttatctcctctaaaacatctaaatcatattttcttgtatataaacagttagatacaaattcaaatacaagtgtattttcatcaataaatgattttggtccgtgtctaaaccccataggagaatcatacaccgtagatatttttcctgctgtaagttctaaaagttttagttgtgcttcttgtgtcaaaccacctaatcctcctgaacctaaatatacaactctatcgaaatctttatttattaactcatgtatttcatcttttctatctataacatttcttcccatttcaattattgcatttatatatgacttttctacatcatcttctaaactatcgaatattaacatagcagataacatcatacacgaaaaacttcctgtcatagcaaagccttcatcatttgattttgatggcattaataacaagtaattattttcgtcgtttttagtcattttagctagttctccttgcggattacaagttatagctaaatgataaaaattatctacaatcttattccctaaatttaaagcagccaaactttcaggactatttccacttcttgcaaatgaaattaataatgttggtatatctttttttaagtaatcatatgggtttgaaactatatccgtagtaggtattgcttcaaatatgtattttcttatgtcatttttattcttaaggtaaggaagtattgaatttcctatgtaagctgaagttccagcacctgtaaatataactctaaactgcccatgattattacttattgtatctatgaatctatttaatttttctttgttagatttatatatttcataagtctctaaccataactcaggttgttgttttatttcattagttgttattattgcacctaaatcttttagtttttgttcttctaatttaaacattttcattctcctttcatacttgtaacgtttacatttggtaatgaggttataaccactttaaactataaaaaaatatactcttttataattttttgcttagattttttagtactacttaaactcactataaaatatacgctatagattttaattaattttatagtttatctttaaaaatttaataaaatcatactttagtatttttattttacgataaaaacttgttcagaccaaagtggtaattaccactaatccaaatataaattaatttgaattttttgtcaatacataaaatatttatatcaatcaattttatagatatcctacaaaattactttgtcaatatttcttatttcgttaatttacttatataagctttaaatttattttttgatacaaagtttacaaatttatgtgtctgaattataatcaattctgtaaatataaaaaccttaggagaaagtattatgaaaaatataaaaatgggaatgataggtcttggctccatagctcaaaaggcatatttacctatattaactaagtctgagagatttgagtttgtaggagcttttactccaaataaagttaaaagggaaaaaatctgtagtgattatagaattatgccattcgattctattgaatccctagctaaaaaatgtgattgtatttttctacatagctctacagaaacacactacgaaattataaaaatattattaaatttaggtgttcatgtatatgtagacaaacctcttgcttcaacagtaaatcaaggagaagaacttatcgagttaagtaagaaaaaaaacttaaatttaatggttggattcaaccgtagattctgtcctatgtacaaagaaattaaaaataatgctacagaaatcgtatctatcaatatatgtaaacatggattaaattccttaagaaatgttagattcgacagtacccttatagatgactatatacatgttattgacactgctttatggttagcaaatgaagatgttgaaattagcggagaagatttatttttaacagacaataagaatcttatatttgtaagtcataaacttaaaggtaaacatttctctgtaaacacctctatgcatagagattctggaacaaagttagaacaagttgaaattctttcaaaaggtaagattcaaagagttaagaatcttaatgtactggaaatagaagaaggtggaaacctaactttaaaacaaagtggtgcatgggtaaatatattaaaacaaaagggttttgaggatatatcaaatcattttattgattgtatagaaaataatataaaaccagctattaatggagaagagtgtatcaaggctcaaagattactagagaaaattataaattcagtaaaatagatatttattataaaaataggttaaaaatgaatttttctaacctatttttatataagactatatcttttatattaaaattaaaatctattacaacaacattaaatttattatattcccattaaatttatttaacttaacttttttacttcaactaaatcttgatatttatcaatttctcccaaatctacaaatccagtttccatatttaaagcattacttataccgcaagcatttgcaaatttaagtaaattttctattttataaccccttaaaatacctacactaaatccagccactgtgctatctccactacctacagtatttatacactttacaactggtacttttacatcatatacattatattcgtttaaatacaccataccatcttttcctaaagatatacatacattctctgcacccatttcaataagtttttttcctgacaagataatttcctctcttgattctatatttattcctaataaatgtcttatttcatctatatttggctttattaaatatggttttgattttaaagctatttttaatgcttctcctgatgtatctaatataaattttatattatttgctctacatatatttcctatcttttcataataatctatcggcatattctcacaataactaccagaagctactagtattttagtattttttagtacttcctctatatcattttcaaatctctctaaatcgcttttttctactattggtcctttttctaaaaattctgtactaactttattgtcctcaattatgtttaagcaatttctagtttcctgctctatttttgtaaatttattttgtatatctagttttctaagttcattttttataaattctccattaaatccacctagaaatcccatagctaaaggattttcttttaaaattttacataccttagctacgtttaatcctttacctccagcagttgcattcttacttactaccctttgcacctcacctatgtttatattattcactttatacattctatctatagatgggttgaatgttattactgtaatcatactagattctcctcattattaatttttacttttctaaacaataaattaatctgtaaaataaaaaatacctcatctataatatacccaaagtggttattaccaatttgaatataaattattttacttgttttgtcaatataccataattttataataaattaatagccttacttattgaattttgattaaactttattcattgacataaataattctatattctataatcaaattgtggtaataaccacttagaaaggactatgtttttatgataaaaagaaatgataaaagaccaatatatgaccagcttgttgagatattaagaactaagattgaaaatgagatggaaccaaacgatagaatgctttctgaaagaaaaatttgtgatgaatatggagtaagtagaaccacagttagactagctatggctgagttggaacatatgggatatatatacaaaagacatggaaaaggaacttttgttgctgcactaagtcaaaattctcaaaacttaatggaaagttatagctttacagattatatgagaatacaaggaaaaaagccaggtacaaaggtattatcatttgaggtagtagaaagtacaaagtatttctctgaaaaattaggtataactcctggtgaaaaaatgataaaaataatgcgtttaagacttgctgatgaccttcctatgatgcttgaaagaacatatcttcctatgaaagaatttataggattgacaaaagaaaaaatcgaacaaaaacctttatatgaaatatttagagaagattatggcgagattattaaagttgctgatgaagaattttcagctggaataatctctgataaggaagctaagttattggaagtaccaggagattcaccttgtctgaaattacttcgtaccacatataatgatgacaatatagttattgaatttactttgagtgttgctagaagcgataaatttgtatatagagtaagacatgtaagatagtgaattaaatagctttcaagaaaatagaatgatattataaacgtcaatgccacaatgatagtataattataaggaggttattttgaaaagttttatttatgcagataaattttttatgaaacatggaatcaaagaaaaaggttaccttagtataattaatggcaaattcggtgaatttcaacaagaaagacctaatattactgataatgtcatagatttttcaggtaaatatattgctcctggcttagttgatactcacattcacggtcttttaggtgcagatgtcatggacaatacatttgaagcaataaacacaatttcaaaaggcttattaaaatatggagtaacatctttcctacctacaactttaactgattctgtagatacactaagtgattctgtagaaaatataagcaatagcttcaatcgagttgagggtgcaaaaatacaagggatttatttagaaggtccattttttacagaaaaatataagggcgctcaaaatgaaaaatattttaaagaccctgacatcaatatattaaaattatggcaaagaaaatcgaaaaatttaataagaaaaatagcaattgctccagaacgtaaaggttcaatagaattaacaagatatgcaactaaaaataatatctctgtttctcttggccatagttcagctacatttgaacaagttaaacaagtcgttaattcaggtgctaaagtgtttgtacatacatataatgggatgagccctttaaatcatagagaacctggaatggttggggctgctatggtactaaaagatacttatgctgaattaatttgtgatggtcatcatgtaagcccaatagctgttaaaataatgatggatgcgaagtctagtaataacatagctttaattacagattgtatgagggctggtgctatggaggatggaaaatatactcttggtaagtttagtgtaaatgtaaaaaatagtgttgcaagattaaatagtgggagtttagctggaagtgtattaactatggacaaggctgtgagaaatatagttgattggaacatagccactttagaagatgcaataaaaatggctacatatgttcctgctttaagttgtaatattgataatgtctgtggctccatacatcaaggtatggatgcagactttatagtaacagataagaactttaatatatacgaaacttatataagtggtatatgtatgtacaaagttaataaatagattcaatataaagttatggaggcttcctaaaaatagagataagtctctttttcattgttaaaatgatgaaaatacatttgatttcatacaaaaagagtgcctcataaactaaaaagttaattttgagacactccttttattaaggttctttattttacaatataagtttataaaattaagaatctggaaatatttatgtgtattctttgaataaaaatttattttttagtgataattaaacatttattggtaaggctatggctttaaaaatcatagccttattttgatattttttccatttttgtaaaaattattacccctttaagaaaattccttaatttttttgaaatatttctttattaatttagagttaaaattctttcttcaaaataaatacttaaatgagctaagatttgagtccaatttctaatcttttgagtccatctttcagaaatatccatagttgctaagtataatgatttgtgcaaagaatcatctaaaggaaaaatagacttcgatttagtaacttttcttaataatctattgtaactttccattgaatttgtagtatatatcaatgttcttatctcttgaggatatttaaagtatgttgctagctcatttcaattgcttcgccaacttcttaatgctatcgcatattgattaccccatttttcctctaagagcgatagctcacttaatgctacttcctctgtaattgcagcatatactttcttttaatcttttgcacattcttttctatttttatatgatacataatttaaagtatttctaatttgatgtacaacacatctttgtatttcagtatcaggaaatactgctttaattgcatcagaaaatccaactaatccatctacagaagttattaatatatccttaactcctctgtttttgacatctgtaagcacctttagccaatactttgaactttcattttctccaatccatattcctaagacctcctttataccttctaagttaacacctatggctatatatgcagctttgtttattattctaccttcacttctaactttataatgtatagcatccataaatacaattggataaaccatatcaagaggtctgttttgccattcatgagctaaaggtagaactctatcagtaattttagctactagagaatgagatatatcaattccgtaaatactcttaaggtggcttgatatatctcgagtagacatgccttttgagtacattccaatcacttggttctctattcctgatatatcatttttataattactaattacctttggttcaaaatctccatttcggtctcttggaatatttaaagttatttctccaaaatctgatttaacatttttatttctatatccatttctagagtttttagtatttttattcttattgccatatctatcataacctaaatggtcgtcaagctccgcttctaacatttgatgaattgtactcgcaaataaatcttttagcatatcttgaatatctgtagttgttttaacatcatattcttcaataagtttttttaatatttcgtttttgttaaacataaaaagtgtgcaccttcctttatatagtgatatttaatattttaattatcaccactttttagaagaatacacactttattttaaagacccatttattgtaaagataaagcatggtctaaaatttcaaattttagaccataatcttatgtttttagataggcctaaaatatttagattagaaaataatcaattttaagacatccctattttatttataattatgtacattttacactatcagttaattagaattatttttattcatatttaaactattcaaattgttttcccaattttttatctccttcttaatgtcttcacttaaagtatcacttgaagacactttctttaatttatcattcaaagatttcttttgttcttctgaaagatctgtttttattgtaggatcaataatatctattacatcttttatatcaaaatcaacaaatttgcataattcatctaaatgatcaattaagaattctatatattcatatgaccattctttataattttttttgttttttaacatgaactcattaatttcataactttgatttgctaattcaaagaatgaacctgaaggatccattatgtcatttatagagttttcatagttaacaatattaatttgtcttattaatttctctttttctgttaagttactataatttttgttaacaaaagcaactaatccaaattcaaaatttaaaattgaatctttacgctgttttactgaatcttctccaaattctctaagaccttctaaatttttatcaatagccttatctctaatttttgttaattgttctatacttaaagcttctaagtttttaggcactatttcttcattatttttagcaatttcttttgatttatcatttgtatttctattattgaaaacaaatatagcagtgaataaacttaaaactattactaaaacaattaaacttacattttttttgtttaacatatcaaatctcctttttaataagtattttatttgtgaaaaaataactcagtttattagaataacctttattactgattattctaaagaatacaatagaacacttttttgatatagtttatataattataacgaatgataaactaatttttagacaaatttatataattcttttattaaatttttaaatcataaaaaagagactaaattccactagtctcttttttatgattatgtaataaaatttaatagctgcttcaactaaatacttattggatcttgaaatagatatttattcttttcaattttcatttaattaaaagtataaatttttatttattcccaataaactttgtaataagaaattttctttccttcaagtttttttaacaaatttgttcttgcaccttcatctgaatgtgcagcatatgaaaaattatatccatttgaatgcttatctgtagatattagtgtatgagttgctactccactactatttaatatacttacaggtgttgctggtcttaaaaaacttaaagagtttgatacagtaagtgtttgatatgcaattcgattcatccaatgtattttaaattctcttgctccagcccaagaaggtgatctattactagtagaataataataccatggattattattcgtccagaatgttactccagcttcatgtaagcattgtgaaacaaagttagcacaatctccatatccatctttttgaaaattataatatggagaaggtgcattattttttctatttgtactaccataataaccattagtatagccatgttttttagcataagctaatgcttgttgtctataactagaagggcttactcttggtaaaggttcatttgaatttttctcattaatatttaaattattttcccagttttctatttcatcttttatatttgtacttagagtattacttgaatacatttttattaattcattatttagagatttcttttgattatctgaaagatctggttttattgaaggatcaaccatttctattacatattttgcatcaaaatctacaaaattacataaatcctctaaatgctcaatcaaaaactctacatattcatacgaccactctttatagttttttccattttttaatacaaattcattaatctgataactttggtttgttactttgaaaaaatcgcctgaaggatccattatatcatttatagaattttcatactcaacaatattgatttgtcttattaatttctctttttctgttaagttactataatttttgttaacaaaagctactaatccaaattcaaagtttaaaattgaatctttacgttctttcactgaatcttctccaaattttctaagaccttctaaatttttatcaatagctttatctctaatatctattaattgttctatacttaaatcttctaagtttttagagaccatttcttcattatatttggttacatcttgtcctttcacattagtattttcatcagcgaaaacaaatacagtagttgataagcttaaaatcattgtcataataattgaacttatattttttttatttaacatattaaacctccctctttaatatatgtattaatacttgccaaaacaaaaatcatattctactaaaatttaaaacaagtttatcaccgtttttttctaaaagagcgtttactaaatatcataatataatcctccctttctagtattatttatatatataacgaataaagaatcgttttttagacacttatatataaatttttttattaattatcaagaattaatttttaagtaagatttaattatcaagagtagaatcataatatataaaataaacaatcaaaaatagtgtaaaaactaatactttttgttaatattaatagataaagataaactaaggtggtgattaaactgacaatagaagaatacaaaaataaatactctactggagataaaattatactttccttaaagagttttgataataaagaactatactatcatgaaactgataacatattaaattcaaaagatgaaatagatagattaacatcaagcaagatatttaaaataatagaagataaaaatgatttagccttagagtcttattattctagtgtaatagaaggtgccttttcaactagaaagattgcaaaatctataattagaggaaagatgaaaccaagtaataaaagtgagtatatgatttacaataatcatagagccttagaatatggattagataatttagataaattatatagtcacaaatttatatataatttacatcatatattgggtgaaaactgtttagattcagaagaatatgaatatagaactgaaaaagtatatgtatgtgattcaaaaggtgagattatacatacaggacttgatcctttgaaaatatataattttatggatgaattaataatttttatggaaaatagtaaagtaaatgatttagtaaagagtacaataattcatttctactttgtatatgttcatccttttagtgatggtaatggaagaacatcaagagccttatcatatctatatttaattaataaaggatatgatacttttaaagagttttcaatatcatatataatatctaaaaacagaactaagtattataaggctatactagatgtagagaataaaggatataatttaactgtatttatagagttcatgctaaagtctataatacaatctatcaatgaaatgcgtgatatgcatgataggaagtctttagagagtatattaaaagaggaattatttgaaaatgatataactctatcagcaacagaagaacatatattaaaatatatctgtagtaaagataattattctatgacattagagaactatatcaaaaagaataaaggtagatacttaaaggctggaataaaagaaatcgaattagttgaccagttgatggaagtgtttaataatcttgaagaaatagagattttatctagagaaaaggatgtatataaagttaatgagaagtacttgaatatgcttgaaataagttaaattgaagcatataaaaataaaaagtatataaagttatataatataataataagccctctatgaatcgctcttaattgagttttcttagagggttaaatttttcattcttaaaataaaaagatttttattttgtccaaaattacttttattattcgttatatatataaataatcttataaggaggtctaaattatatgatattaaataaaactattatgaaataagacaaggtttgattgtgaagttatataaaaagattatttttaatataactaacaggttatatgacagtgtttatagaataaatatttaagtaaaggtagtaaaatattatgttaaagaaaaaaataataagttttttaatggcaggaatatttgttttatctagtggatataatttggtttatgcatctacttttgaagaaaatgaatataaacaagaacttgttaatgaaaacgaatttactattattaatagcaatgaaaatgaaatgattgtggataaaaaaggcaataacacttatgtttcaacaaaagttacacctggtagttggaaaaatgttaaatatctaggtcaaaaatcacgcaaattaagttctccttatacaagagaaagaattatacaaactattcaatggggattaggttatctttctggagggtcatcttttttattaggtttagctgagagtatttatagagaaaaagtatatgacattactaaatatggaggcgtatatacaaaaacatactataggagacaaataactgatattagaaacagtcatgctaatgttcctgttccatacagatatgaatatgttacatatttttatagctcatctaactttaaaaaagttgtatatactgaaagagtaggagatggtataaaactagcaaataactaggaggaaatatatgaataataagaaaaaatcattcttgatttctggcactataaacgtaattttattaatcattgtttttgcattgtttagttataatattatagaaaatagtacacgaaatatgataataactgtaattttaatttttatttttgaaattataaaaataaagatactagagaaatattataatctataaacaagaaatatctttcctaagagcatattgtaaagtatgctggtacaaatttacattacaaactatctattctgatgtaaaaataaaatcaaaactccaattaatttacaaaaagcatggcaaatctttaactctagttttacatttatgctataatattatttatagagtaaacataggtggaggtatcaaagatggtagtaggttatatgagagtttcaacagcagaacaaaatgaagatagacaattagttacaatgaaaaagcataatgtagaaaaaatgtatcaggagaaaataagtgccaaagatactaaaagatcaaaactaaacgcaatgttagattttgtaagagaaggagatacaataattgtacatgactttagtagacttgctagaagtactaaagacttattagaaatagttgagctcttagaaaagaaacatgtaaagttaattagtgataaagaaaatttagatacaagtacacctacaggaaaacttatgcttacaatgcttggcgcaatatatgaatttgagagaacaaacatgttagaaagacaacgagaaggtatctctatagctaaagaacagggtaaatataaaggacgtaaagaagttaagatagacaactttggtagttattatgatagatataaaactagagaacttaataagactcaattggctaaagaattgggagtaagtagaccaacattagatagattaataaagagccatgagagtaactaagaagagcaatatatatgcttaagttaattttagtggggcaaattcatagaattatgccctttaattatgtttaaaataattataaataactgtttttcagtatagggggtatccttctatttcaaaaaagtattatttatagaaaatgagttctagaaattttctagcaaaaattaaaaaccagagacatatttcaaagagggtgattttattagaaaaaaatttgcattgtttattttattaattgtattactcactgaacctaaaaaaatagaagaattaagaggaagtaaatacgagtggataatttagaaagaaatatacaattaatatttagttatatggcaaagacctttataagaaatggagcaactataagagaagctgaaaaagaagcaaatgagattataaaaactaattcaagcaatctttggggagttaatggcctagcttatcagcttggaaaaataaatttagaatttttctgtatgtattttatacaagacacatatttaccaaaagaagataatgttgctgctcctatagctaaagttcatcatgagttatgggaagatatacaagagtctataattggagatggttcacagcaattaggaagaatttatccaagaggaacaggtaaaagtgcatttggagatttagcaacaactgtatggtcacattgttataaacataagacatatactttaatttgctctgatataggctctacagcagaaaaattcgtaaaagatataaaaaatgcattacttgaaaatgagtatattaaaaaagcatttggagttctcttaaatgataatgatagaaaatatatttgcaatagtactcaattagaattaactaataaaacctttattgaagcaatatcatcttcatcaccaatgagaggaaaaaaatacaataataatcgtccagatcttatcatacttgatgattatcagtcagaagaaaatgttagaacagaagatgctagagagaaaaaatttaaaaaattttctgatgatgtaaaatatgctgcttaaaaaccagtaataagaaatggtaagattataaaaagaggaacaacttttatagcattaggaaccttacaacataaagaatgtttctatagtaggctaaagaatttaccaacttggaaatttaaatgtgaaaaaggagttttagttgataatgtagatgaattatttaattctggtttatggcttaatttcaaagagttgttatttgatttcaaaaacacaaatcatcttgaagatgctaaagaattttactgggaaaatgaaaaagaaattaaatttcctatattatggccaagtttttggaattgtttagacatggctttaagttattacgaaaacccaacatcttttaaacaagaggtacaaaatgatgtaaattcaataggtgagaaatggtttaaaacaatcagaacttaatctagagaatgtatagaaactcatacattcaaaaagacaatgttattatgtgacccagcatctgcaggtggttctaaacatgactatagtgcttttcttgttggaagtgaatcagaaaatggtttactatgtggcagattggcagaactagccaaaataaatgctagaactgattttgataaatatatattgcatatgatttatttattaaaagtgtatccagatataacacatgtttatatagaaaaaaatacatttaatggtacagctgctaatcaattagaacttaaaataaaaaatgatgatgttctttactacagagatatagaaatcattaatgagcaccaaaagaaaaataaagatgataaaatctctactttaatacctgttttaaataaaggtcaaatgatttttgcagaagaggataaggcatttatacagcaaatccttaattttacaggacaaaagtactctctacatgatgatgcaccagatatatcagcagaatttataaataggatttttaatattaaagtaaatgaaagtattacactattagatagaagaaatttaggtctttgattgtatggaggtgatgcattaaatggaaatagatttaagtttattaagagaaatatatgaagactagagtttaaaaaagcaagaatacaacactatgtataagtattataaaggtgaaacagatgctattagtaactataaaatggttaccaagaggtctaataataagataaacactaatttcttaaaaaagtttattaatgaagaggtcgcttattctcttgcaaataaaatcacctatacaagtagattaggtgatgagaagattataaatgatttagaatactatacttgccattggagtaaaaagcacgattcagatttattgagatatacactattatttggattttgctatgaactttactatgtaaaaaacaatgaaatgaaagtaagaataataaaaccaacagatggctgccattatgaaaatgaagatggagagaccatctatttttttagagaatttaaaaaagattttaaagatgatatttatatagatgtatatgataaagaatacatatatcattttgattcaaattttaaagagatagaaaaacctacagtaaataatatatttaatggtaatgttccaatatcaatttgtaaaagaagtgaagaactaggaaaaaatacaatattcaatgatataaaaggattacaagatgcttatgaaactaatttaagtgatataagtaatgaaattagtgattttagaaatgcttatttaaccttctctgaatgtaatattaaagaagatgatttgccaaggatgaaagaacttggaatacttcaagttaatggagatggaaaaatagaatggcttattaaagacatgaatgatacatttgttcaaaatacactatcttcaataaaagaaaacatatataaaattacatctcatataaatcacaatgaaaaaatgcaaagtaatacatcaagtttagcagttgtagcaagattaatcagtacagaatggatttgtagccagaataatgatagtattgcagatactttatttaataggtacaaattattgtgcatttggcttaataaaaaatatggttttgactatgattataaagatattaaggctaaatttacccctaagataccacataatgatttagttgtagcaaatatattaagtcaacttggagataaattatctactgaaaccggattatctcaaccaagttttattgataatcctcatgcagaaatggaaaaggctaaaaaagaacaggaaatagtttcagagggagagattttattagatgaatcaaaagattataactaaattgactgaagatatatataaatctgctgaaaatagaggtgcaaaatcggacgtaagggaattgtattggcttagtcatacaaaagctccagcgatattaattgaagtatgttttgtagacagtaaagcagatacagactattaaagacatagttgctaaattaatagcagaaggtattttgaataaaactatagataatagcgagggaaaaatcatgtataaacatacaatcatttatgatggagaagctgatatgatacctgcaactgtgattggttggggttataatgatgggaaaatactgatatgtgatataaaagattatataccaggtcaaacagaaaatttatatataaattatgtttcattttctataataacttattttataaaatagagtgccaatataaaaaagtataaatattatacacctattttatattggcactctatttaaaattaattatatttgcttttaaaaaactattattcttgtttactacaactcataaatacaatatctatttttaatatttctttgtactacttattatatttttactttcagagttagcttttattgtggaatgaactctgtaatatccttttcctatagtttttgacttagaaagagaacatgaaatatttcctgaagcattccatgtttggattgttgaccatgttttcccattatcattgcttttctgtaatctagcaataattgatgtgcttgtaacatttgatgctcctctaacaaagcatgttactttagctgtacttcctgaaatacttaaattgcaagtaccagacttaatataagacattttcaccatagtatcatctatatagtttactgctgaatattgttcaatattcttatcttgatattcatcagcaaatgcaggtattgcaactgctgatgaacatactaaagcacacataccacttataactgtttttctaagattcataaaatcacctcttcatttgttttctatttatataacttatataacgaatgaagaagtgatttttggacactaatgataattttttttattataattttaaattatacattttctttataatagaatgtctttaactataatagttatgaatatctgtaaataatatgtattgtgactatcccccaataaattcatgatttttattttacttataatattaaattgtaaacatctgaactagaccagattttactactaagactccgcctcctgttgtacttgtacctttcaatatagctttataatccccttttttaagatatttaacatctatttgtccagatatagttgaagatcctccaccacttattggatatgatgctacaagcatattttttgaatttctaatctcaacagttcctgaaaatagtataactattccttttgaagatgttatcctccaattaagatgtttacttgacatataacctatatatgcagttcctccactaccatgtgtatatgctttttcattactttgaaacactaatggcgcctcagcataaattgaatcattttcagctttttcattagcaaatactaaagttgatggtaatataactaaacttaaagtaagtaataacgcaaataatcttttcatgtgtattcccccagttttaaattaattttcgaatatcaaaggtttatcgctttccctcgatttaatgacaacatcataattatgtttagcaatatcaattgcacttaaaaaaggtgcaagtacactttcaataagagacatttcttcatacagtatatatccttttcctgcatagaaattagttaatttctcaatatttattttgcatagaatagatattgtttctaacgagaatttataatcgtctataagaaaacttaaatcttccataaatttttctagaacttcgttgtctctatacaatttattacttttacataaatataaatctgatttcattttttacacctcaattttaaagttttattcctattgcaagcatgttataactataatgtattaatttttcctataacaatatttttaacgctcaggtaaatgtagattttaaaaccataaaaatcacctcacattttcatatatacttgtataacgaatgaagaggctacccttggacacttaaaaaaattattttatacttttcgctatttttatcaaaatatcttcataaaattcagattctccactattttgataatctacatttaataaatatataaagttgttgtcattccaaaataactgtaagaaagttccttttactatatattttgctttatgcccatttacaaatatatctttaacttttgcattttctgtatctaatataatagaatttgaactaattttatctgttacatattgtatctcaatattttcatcatttctatatgtaataacaaaatcatcaactctatcaacttctttaaatccttttggtatatactcaggttctttattttttaaactaagattatcttctccattagttgaaaaaacaaatgaagttaagtcttcatatactcttattactaatctaaagaaacgtgaacgcaatgcctcactactcatagtaatagtaagtaaactagctaaaactattaaaaatacaatagctgtttgttttgaataaaaaatgattttatttgtaagactacttcttttttgttgcttaatgagttttttcatttttcgctcaaaaccttttgaaaaaacatgatttaattcatcatctgaaagaaggtcatcaataataatttttgtcgctattgggatactttctctaagcatatcatccgtaatatcaaaatcatcttttttattactcaatatttccaacctccatttcttctaatatttcttttaatttttttctagcacgctgaattctcttatatacattttcctcccctaaatttaatgcatttgctatttctttatttgaaaaaccatactggaactttaaggaaagcacttgaaagtaactttcattaagttttgcaagtgctatagctaaattactttcacatactttatcttctatagaaaaatttatctccctgtttttatactcttcttcaatatcagataccttttctctttttctctttctgtaaaagtctatagcaatcctttctactattataacgataaaagccttcgttcttggactgtctacctcatcaattttatctatatttttaattattcttaaaaaagcattatgtactgcatcttctgataaatgatcatcctttaatattttattggctacataaaacattatttgtctatacttttcatataccttttcaaactttattttatcttcttcgagttcaagtatagctagataaattaacatttagaattcctccaatataaaaattctgaattaatattttaaagttcaattataacataaatatataattaactctacttaaatagaatataactatgcttaacaagctttttaaagatatctagtaaaaaggcccttcaaatccattttcgggattataagggccttaactctacaaatgattctcaaagttaaatttttaaattaattattttcgtatatatctaattccataaaaattaatctttttttgttttgatgtaatagtatataaacaaaagtacatatgctaaaggtattaaaagcaatatttttaaatcaatatcaaatgtattagtataaaatgataatgcaagtgataatatcacaattatcaggtttggaattgtttttaaaaaaaccttataaagcctttttttcatattattcctcctaaaaaagcatgtcttttaagtttgatagaaccaatgatcatatctataagtatatgttgcaccctgaaaattccacttatcctctatatatgataaaacaatcccataattagtatttataccatccatgttaattgttattatctttccaattgccactacatcaagctctacccaaatttttggtaaaaaacctccaaaagtagatgcaagatctgttccagcttttattttctttaatgtctttccacttacataaatatataaatagtttttaccatttttagtaaaagttctgtatttgttatacccatttatatatttcacacgagaattttgatttactttcttagcagaatcgtccacttcttgattgattttatccaattccttttgagtaaattgacctgttttaattaagatctcatcaatcttttcatctgaaaaaattttatcctcaggccagtaattatgtaattcctctacttctttgtcagacaactctattttcacattattatctgattctgttttttccattgcatttgctgtaacagcaagtggtaaagatattatcacagctgccatcactgttgataaaaggagattaattcttttgatattcatttaaatccccctaactataataaatttaaggttttaaaattaaccctttacatatataacatatttaattttgttttttggacacaagttttaaaaaatttatatttttaaaacttatgaaaatataacaaaagatacttgatttgagagaagtgtttttaatattattatatttcaaacttaacgcagttaaggttttgtaattatttatatttgttatttataaaattaattttaatatagttcagtttttaattgacttcatacaaaatagaatataacttatacaataagtgagtctggaaatatttatgtgtattctttgaataaaaatttatttttttagtgataattaaacatttattggtaaggctatggctttaaaaatcatagccttattttgatattttttccatttttgtaaaaattattatccctttaagaaaatttcttaatttttttgaaatatttctttattaatttagagttaaaattctttcttcaaaataaatacttaaatgagctaagatttgagtccaatttctaatcttttgagtccatctttcagaaatatccatagttgctaagtataatgatttgtgcaaagaatcatctgaaggaaaaatagacttcgatttagtaacttttcttaataatctattgtaactttccattgaatttgtagtatatatcaatgttcttatctcttgaggatatttaaagtatgttgctagctcattccaattacttcgccaacttcttaatgctatcgcatattgattaccccatttttcctctaagagcgatagctcacttaatgctacttcctctgtaattgcagcatatactttctttaaatcttttgcaaattcttttctatttttatatgatacataatttaaagtatttctaatttgatgtacaacacatctttgtatttcagtatcaggaaatactgctttaattgcatcagaaaatccaactaatccatctacagaagttattaatatatccttaactcctctgtttttgacatctgtaagcacctttagccaatactttgaactttcattttctccaatccatattcctaagacctccgttataccttctaagttaacacctatggctatatatgcagctttgtttattattctaccttcacttctaactttataatgtatagcacccataaatacaattggataaaccatatcaagagctctgctttgccattcatgagctaaaggtagaactctatcagtaattttagctattagagaatgagatatatcaattccgtaaatactcttaaggtggcttgatatatctcgagtagacataccttttgagtacattccaatcacttggttctctattcctgatatatcattttcataatttctaattacctttggttcaaaatctccatttcgatctcttggaatatttaaagttatttctccaaaatctgatttaacatttttatttctatatctatttctagagtttttagtatttttattcttattgtcatatctatcataacctaaatggtcgtcaagctccgcttctaacatttgatgaattgtacttgcaaataaatcttttagcatatcttgaatatctgtagttgttttaacatcatattcttcaataagtttttttaatatttcgtttttgttaaacataaaaagtgtgcaccttccttatatatagtgatatttaatattttaattatcactactttttagaagaatacacactttattttaaagacccacaaaagagtgcctcataaactaaaaagttaattttgagacactccttttattaaggttctttattttacaatataagtttataaaaattaaactttatttatcaatctgttctctaagccatttagtcgctacatctaactgtttattttcatctttttcttcaatagtaggctttatgcctttttcattgatataatctccattaggtgtaaaatattgagcagtagttaacttgtatcctgttccatccttcaatcttacaactgattgtaccaaccctttaccaaaagttgtagtccctacagaaataccttctttattatcaacgattgcagctgttaatatttcagcagcagaagcactttctccattagttaacactactattggaagtcccaatttttctttatcagatttcaagtactcagtatttcccttattatcttttgtatatactatagttccttcaccaattaactcatcagcaacttctttacatatatctagcattccaccaggattatttctaaggtctattactaatcccttgatattttttgcttttaattcttttaaagctttatcaaagtcagtatatgtacttgatataaattgggtaatttctatatatcctaaatcattatcaattactttactttctatactcttctcaattatctggtctgtttttactttaaagttcaattgtttatcttctcttaatatagtcagttcaactgttttcccttttttacccttcatcatacgaacagcttcatctgaatttttatatgagacagattttccattgacttttactaatttatcccctgattttacacctgctttctctgctggagaatctttcatgggaactactactaagccaccatcttttgatgcccctatatacatacctacaccaacataagaaccttcactatcattaattagattctccatttcatctttagtataataaccagaatacttatcatttgttcctagaaatagaccttttgctgctccatttaccaaatcagtatctgatacttttttataaaaatcttgttttataatagattctagtcctaacaacttatcatattttttatagtcttcatagagttctttcgatattacaactttattccccaatgtcaactgaaatgctgatgtaaccatagctgttataattactaaaatcacccctaaaaaaatagctttcttctttgaaatcacaagatacatctccttttacataaactattattattatatgactagctgttatttttattacatttacccaaatatattgctttattacaataaattatactaaaatttatattaaatacaattgctgtacacattataacatattaagggaggaattattttatgaaaaaagaatttagaaaaaaagttattgaatcaagaaaaaataagagtgcaaactttgtacttagtaattcaaatttaataactgaaaaattacttcaaatggaagatataagaaatgcaactaatataatgctttatctaaattttaacaatgaagttcaaacagataatttaatcaaaaaacttttgtctctaaagaaaatagtatcaagtcccatcacaataaaagaaaatcatacattaatccctactcaaataacagatttaaaagagggattgagaattggagcatatggaataagagaacctaacgaaaaatcacctacaattgatattaaggccttagatgttgtaattgtaccagctgtagcatatgatatacattgctatagattaggatatggtggaggattttatgatagatttttagaaaacttaagaaaagatgctataactattggcatagcatttgacttccagatattcgattctattccaaaagaaactcatgatgcacaattagactacatagttactgaaactagaattatcactccaaataattagaacattaagtatttccagaccccatttaatatagtaataaatactactgttaatatcttactttataagcattttaagtcatggcttttacaacaataagaaccatatacaatttacttacattaataaaaaccatgactttattgtacaatatgcagttatttaattataaaataccttcttatttcgtcgcatttaattctattctatctggaagttcactcatatttgtttcaacaactatgtatggaaaagaatcttccttatctttatactttatcttgactctcaaaacatcctttccttcctcaaccacactttctattttgtccatttctataccatatttattatttcctctagtcactataatgtatattttgttatcgattttagccgctaatgctctttcttcatttgtatacttatccatcacatctaatatcttttctggtattgaatttctttgtaatactgtataatctatgggtttagatttctctacaaacatacttggtatgaatataaatccccctataacgaatacaagagctataactccataaattatacctttaatattaaattttacattcaatcttatcactcctcccatatattctaaatatatgatttataagcttatcttagactctaaattattgattagtatatatttatccataattataaatatatgtaatgtaactaaaaaacatgtttttcctatttcataataaacgagctaaaaaataaaaagagctatatgaaaacattttcattgttttcatatagctcttgagtttacaatattaaaaaatacttatttgtcactgattccttcttgatatccagatgtttttgtaatctgtctataaagaacacaaaccagtattatgacgcccatatatccagtatatggatataaaataccaaccagcttatcaaatggtaggaagccacctataagacctaatatagctgctattaaagttattaatttaaacttaggatgtttatcatctacaaatctattagttactgaccataataaaggtacagctgttgtatatatacctaatataagaattattgagaataaaactccaattactggtgaaatcttatctgctaagaataatgatggtattgcttttgaatataagtttcctatatcagaaagaatagctaagtgcatcattatagctgcagccataagtgctactccacctaatataccaccacaaatagcttcttttttgttagcagcacttgctcctaatccagttaagaatgccataacaacaattgtgttataagtagtatatattacaccagatagataggcatttggaactggtttagctatctttacagtgctaagaacttgtgcagcttctcctatattacctatgtttttagctaaacttataccaccaactaaaagtgtaaagattattattataggccctattccacctagtatctttgataatttatcaagacctagtgaaacagttaataatgctactactgccatacctactctacctacaaatggatttaatccatagtattcagttaaagttgctcctgctcctgaaatcattactacgaaaacaccaaataagaataaaggtccaaaccattcaaagaatatccctaaatacttaccacaataaacacgataaattttgataggttctttaagttgaagctctttaccttttgacataactgaagcacccatccatgagaataataccattgaaattatcccaccaataatacctgcaaaaccataaaaagagaagaattgcattatttcctgtcctgttgcaaatccagaaccgattactgttgctacatacgcacctgcgaaactgatgactgttttaacatttactttttctgacatatctcagttacctccccatgtgaaattttttcttctgattaaataattcgataaactacctacaatttcctttaacataaaatacatgataactgttttatagctttttagtataataacttaaaacttataatctgattttataccctactcctcctctcataatttttttagattcttttatctaagtagtcattatatataaaattagtttctctatagattatatattagtcatatttttctgaatagtcaatatatatttgaatattttctctatttttgtaaaaatttgaatattttattacatttttgatatattgatatcatataaaaaaaagagagatataaattaatataacactttatacctctcttttaaatatattatattattaacaaacatgaataatttatatctcttacattctttttgcaataatagcttctttaacagtctttattatgtcatcacaagttaattcatatttttttaacaattcatttggagtaccagattctccaaatgtatctttaattccaactttctttacaatggttggacaagactctcctactacctcacttacagcagaacctaatcccccaattatgctatgttcttctacagttacaatagcattcgtttcttttgctgattctaatattaaatctttgtctataggttttatcgaggacatgtttataactctagcatttataccttcttcttgcaacttttcttgtgctaatagagcttcatttaccataattccacaagctataattgatacatcctttccttctcttaagactgtaccttttcctatttcaaatttataatcttcatcaaataaaactggtactgaacttctccctaatctaacataaacaggtccattatacttagctatttcaaaaataattttttctgtttcaactccatcagctggaacaagaactgtcatatttggtatagctctcattatagcaatatcttccacactttcatgagatgctccatcctctccaacagtaagacctgcatgagtagcacatatttttacatttagctttggataacaaactgaatttcttataatctcaaaagcccttcccgtagcaaacatagcaaaagtacttgcaaaaggtattttaccagcagttgataatccacaagcagcgcctattaaattttgttcagctatacccatattaaaaaatctatctggaaatgacttgtaaaaatcatgtgtttttgtagactttgataaatctgcatctaatactacaacattgtcatttatttgacctaattttactaatgctttaccatatgcttctctcgtcgccattttactcattgtcagcacctcctaattcaagcaaggctttttctagctcctcatcacttggagctgtcccatgccatcctgcttgattttccataaaagatattcctttgccttttatagtttttgcaactatcattgtaggttttttaactgttgatttagctatatcaagagccgcaaatatttggtcaaaatcatgtccatctatctcaattacattccaaccaaaagctttaaatttatcaactattgaacctaaactcattacgctttctatatctccatctatttgaagtccattattatctaaaaaagcaattaaattatcaagtttataatgtgcagcactcatagcagcttcccaaacaattccttcttgaacctcaccatcaccaagcaaagtatacacattccacggagcattatccaactttgatgccatagccataccacatgctactgaaaaaccttgacctaaagaaccagtagatatttccacacctggcgtgcctttcatgtctggatgaccttgtaacatccttcctatcttccttaatccattcagttcttccttatcaaaatagcctttttcagccaatgtagcatataatgctggtgcagcatgtccttttgataatacaaatctatctctatcctccattttaggatttgaagaatccacattcatttcatcaaagtataacgcagtaagtatttcaactactgataatgaccctcctggatgtccagatttggctctatgtatcattgaaactatatctcttcttatgatacgcgcaatctcatttaatcctttatggtctctcatgcaattacctcccttgagttcgtaattttatatcaattccatattattatatcacttttatgctatttttttgcgttatttttaattttattaacatagtacattaaaattaaaccttaagagatatttaaaagaaaaaagggattgtctaataaaagacaaatccctctttaaaaagtaaacaatcctaaacttatttgaagtccatcatctacttttatcatcatattttcatctagacaaccaattttttccctcagtctctttttatcgatagttctaatttgctctaaaagaattactgagtctttattaagcccatattcattggaacttatctctacatgagtaggtaatttggctttattaatctgagatgttatagctgatactataactgtaggactatatttattacctacatcattttgtattatcagaacaggtctaacgcctccctgctctgaaccaacaactggacttaaatcagcgtaatataaatcaccacgctttatttcacaattagtactcaccttgggcaatcttcccttcatttttatcatcagaagatacttcttcaactgtcatacctaattcagctagtgacagattaatttgacccatttctctataacccgttttcatagattctttaatatgaattttctttttctgagttatatagaactgaaaagcagcttttgcaaaatcttctctgttactgttctccatctgaactatactatcaacttcagaaatcagagagtcaggtaaagtaacttctattttttctttactcttatcgtacacaaaatcgcctcccagattataatatcatggttttattttagcaaataactgtttatttgtacaagctcattattttccatataaacacggtcaactcttcttgatatcatacataacacttcatagtttatagttcctaagtctttagctatacgctcagctgtaacttcgccttctccaaatagtataacctcatctccaacttttatgtctatatctttgtcaattctaaccattatttgatccatacatattctaccaactacatcaaacacttctcccttaataagaacctttggatttttttggattctagtaaatccatctgcgtatcctattggaactgtagctattgtttctttacctgtagttgtgtattttagtccataacttattcctacacctggttcaacttgttttatatgtccgatttttgattttaatttcatggctggtcttaattctaatctatctttaaatacatcatcagatggataatgaccatataatattattcctgctcttaccatatttaatcttaaatcagggcaatccataatagctgcactgtttgatacatgttttatagctatttttacaccagcctcatctaatttatcagacataaatttataattattagcttgtttataagtgtactctttacttacttcatcagctgtagcaaaatgagtaaacataccttctaaatcgatatattctaatttatttaattctattatttcctgtactgactcctcattaggttggaaacctattctagtcatccctgagtctattttaacatgaacacaggctttttctcctaaagattttgcaatttcatttatcttttgtgctgtttctaaagaataaactgtcatagttattttattttttatagaatcttcaaaagcttcgtctggagtatatcccaagttcaaaataggaagtgttatgccattttgtctaagttcaattccttcagcagttcttgctactgctaagtaatctactttttctttttctagcaattttgcaacttctactgcaccatgtccatatgcatcagcttttattactccacaaatcttaatatcttcttctaataaatttttaatattatttaagttaaatcttaagttatctagatttatctctgcccatgtaggcactgttattttttgcatgtctttagtcccccttagtttctgtattcaaaatctttgtattttactgtaaatcttggcactccctctttatctaacacttccattttttcaggattttttgtgtcagcatttacatataatacttgcttgttaaaatatttattatccccaggaataaaagtctctaaaaccaaatgtcctttggataactttactttcatctcctcattttgaagatagttttttataaagtctcctacaaaaagatattgattattttttcctgtattaggtaactccactacatcactaatctttggatttttaactaatattttatcaccttgatattctatacttttcccttttaaatgttttggggaaattacttctaatttatagttatcggtttttttataagtatgaattaaaacataattgtgtgggcttttatttccaactacttctacttcagctttacaactgtaataattcatatcagaaatctgcttttgaaaatctttgtatacttcttcttttgtggactgtcgtttttggcatcctattacaattataaccagtgccaagaacataatacatactatggtccacttttttctcacatcacacctcctacttcagtttattcattgtataaagcttttattatatcatatctacaaattatacctttaagtttgttgtcatcatctactacaggaactctgtttattgattttttaatcattacattagctacatcatcaaacttatcatcttcatgaacctttattatatctttagacataagttctccaaccttataagcagctacttgttttatatctttttcaactttttttaagtcatctaagaaaatcaatccttgtaatagatttatatagagaggtgcttctatatatttttcttttttaagaatatctgtttcagaaattattccaacaactctattctctgaatctacaactggcagacctcctattttttctgcaattagcatattagctacatctgctatactatcatcttgttttgctactattacatctgttgtcattatttcttttgctgttttatccatcataatgtaatcactccttagtccttaattatggttatcgcatttgctatagcataatcttttgaatgtgatattgaaacttttatttctaaaacattataatctatgcacatttttgctagattattataagtttttactattggttttcccatttcatttctgagaacttctatatctttaaaattaaacaatctaattcctgtacctatagatttacttatagcttccttggctgcgaaattacctgctatactttctgctttaaaattcttagaattaaaatactctatttctctatctgtaaatatcttctccaaaaacctattatttttgtctacagcctttcttattctatcaatttcaattatatctacgccaatatcaaatatattcattgttcctccagaaaatttataatacttctttcaataattaataatgaatttataaatttactatcgataatacacattattatttagtttatgttacttatcttaatttaataatcattataataaaactgtaacttttaaaattatttgtaatgaatattatatacaaatctattatattatttattatactacacaactaagcaaattttttaaattttataaaaattttatatgtatttcttatatgaagactttttcacttacataaaagctatctaaatcttctttatcttattaattacaacataatttggcagtaaatttaaacattttgtgaatttattatcactaaaaacttacaattttatcgttattttattaacaccaaaacacaaaaaagccattttacccaaaagtttttttggtcaaaatgactttttatactctaaattaatttattaaatccactcagcagattctgtcaatatgacagttttatcttgagttacattaatgaatccttctgctattttcgcctctttaaaacttccctctttttttatctttaaagttcctacaggtatacctgaaacaaatggtatatgacctttcaacacccctttgtctccttttgtagttctaactactatcatttcaacatctccatcataaaaagtattacttggagttacaactttcaatgaaaattcactggccatgactacatacttcccttcgcttttctaacagcgtcttctattgttcctacaaataagaatgctgactctggtaagtcatcatgtttcccttcaagaatttctttaaatcctcttacagtctctttaacaggaacatattgacctggatttcctgtaaattgctcagcaactgtgaatgattgagataagaatctttgtatctttctagcacgtgcaactattaacttatcttcatcagataattcatccataccaagtatagcaattatatcttgaagttctttatatctttgaagtattgattgtacacctctagctacttcataatgttcttttcctactatactagggtcaagaatccttgatgtagattcaagagggtcaactgctggatatatacccagtgatgatatttgtcttgataaaactgtttttgcatctaagtgagagaatgttgtagctggtgctgggtcagttaagtcatctgctggtacatatactgcttgaacagatgttattgaacctttcttagttgatgttattctctcttgaagtgcacccatttcagtagctaatgttggctgataaccaacagctgatggcatacgtcctagaagtgctgaaacttctgaaccagcttgtgtgaaacggaatatattatcaacgaaaagtaaaacgtcttgtccttgctcatctctaaaatgttctgccattgtaagtccagttaaagcaactctcattctcgctccaggtggttcattcatttgaccaaatactagagctgttttatttataactccagactcactcatttcgccataaaggtcgttaccttctcttgttctttctcctactcctgaaaatacagaaataccaccatgttgcttagcaatattgtttataagctcttgtattagaactgtctttcctactcctgctcctccaaatagacctatttttccaccttttagatatggagctagtaagtcaactaccttaataccagtttctagtatctctgctgtagtttctagttcatcatacgccggtgctggtctatgtataggtaatttaggtgcagattttggagctggtttcccatcaactggttttccaagaacattgaatattctacctaaagtctcatctccaacagggacacttattggccctcctgtatctacaacttccatacctcttacaagtccgtccgttgcactcatagctatacatcttacagtatcatcacctatatgttgagcaacttctgcaactatttctttatctcctaactttattactaacgcatttaataagttaggtaggctttgttcactatcaaacttaacatctagtacagctcctacaatctgtactactttacctacatttgccatttcctaacctccctattttagagcttcaactccaccaactatctctgttatttcttgagttacagctgactgtcttgctctgttataacttaactctaaattagatagcatttcattcgcattgtctgtggctgattccattgcagttcttctagcaccttgctctgatgcaaaagattccaaaattccaccatatactgtacctgatataaactgaggtacaatataacttaaaactgcttctgctgatggtatatattgtacttttgatctattttgtttttcttcttttactgccattccttgttcgtctgtatctttttcaaagactaatggaagcaatttcaaaatttcaacttcttgtgataaagcagatttaaattttgtataagcaatataaacttcatctacttcaccttttttatacaggtcaataatagtttgtgaaatttctgtcgcatcttcatatccacaagcttcaacactatttatatcttttgctatattgtagtttcttttagaaaaaaattcatgtgctttctttccaacagtaatcactgtttcctttttacctttcatatgagagacagattcctttaatacattggaattgtatccacctgcaagtcctctgtctccagctactactacataacatttattttttacttctctttcttttaaaaattcatttctaattccacgtgttgtttgggcaatatcttttactgtattgtataaagtattaaaatattctcttgaatcttcagccttttcttttgcttttctaagcttagaagatgcaactaattccattgctttagttatttgctttgtactttcaacagttcccatacgtgttttgattgctttgattccagctcctgccaattaatttacctccttttttaaaaaggattatacttcaacaacaaacttttctttaaattcatttattgcatctgttaaatcatgagtgaagtcttctccacctaatatttttcttgatatttccggataattattatctacaaatgcatacaattctgattcaaatctagctatattatctatcggaatatcctctaaatgattatttataacagcatatattatcataacttgattttcaacttttattggttgatgctcaccttgttttaatatctcaacgattctttcaccttgagcaagtctctttttagtatcttcatctaagtcagaaccaaactgtgagaatgctgcaagttctctatattgtgaatatgcaagttttaatgttcctgcaacttttttcattgctttaatttgcgcagaaccaccaacccttgatactgatataccagggtcaactgctggtcttacacctgaatagaataactctggttgtaagtatatttgaccatctgttatagatataacatttgttggtatatatgcagaaacgtcaccagcttgagtttctattataggcaaggcagtcattgaacctccacccaattcatcagataacttagctgctctttcaagtaatcttgaatgtaaatagaatacatctccaggatatgcctcacgtcctggtggtcttctaagtaacaatgacatttctctatatgcaacagcttgtttacttaaatcatcatacactataagtacatgtttcccattgtacataaattcttcacccatagctgctccagcatatggtgctatatattgaagtggtgctgattcagatgctgttgctgaaactactattgtataatccaaagctccacctttttctaaagagctaactaattgagctatagtagaacgtttttgtccaattgctacatatatacagataacatcttttcctttttgatttagtatagtgtcaataactatagatgttttaccagtttgtctgtcacctattattaactctctttgacctctaccaattggtatcattgaatctattgatttgattcctgtttgtaatggttcataaacagaccttctatctattataccaggtgcctcagattcaactggtctagtttttgtgtacgctataggtccttttccatctattggctgacctagtgagtttacaactctacctattaaagcttctccaactggaacttcaactattcttccagttctcttaactatatcgccttcttttatttcactgtcatctccaaggataacagctccaactacttcttcttccaagttaagtgccataccatatatttcacctgggaactctagcaactcaccagacatagctttttctaatccatatacactcgctataccatccccaactgttaaaacactacctgtatctgtcaactcaactttattctcataattttttatttgctgtttaattatagaacttatttcttcaggttttaagttcatgggttcaccgccattcttaagatattacttcagatagcttttctttcatcttatcaagacgagttttcacagtgccatctatttgttcatttccaattctaactagaactccccctagtatagtcttgtcaacaacattttctatagtaacatttttgttgtatttatttgaaagtttgacttcaagttctttaatatctgtttcactcattggaatagcacttattgctactccatcaattacattgtttttcttatttaataattctttataagctaattcgatatcttctaaatatgatattctatctttatctactaaaacttttaaaaagttttttatgttagaacttacttccttactaaaaataatttctaccaagtttttcttttctgattttgaaactaatggtgattttaaaactttgtagaaatctttactaactttagtcatcatatctactactttttctagttctttgaataagacatcagttgaattttcttcttctcctaattgaaatagggcttcggcatatctatttgctattacatttatcatttagcttcccctacctcttttataaagttttctatcaattcttcatgtttagatttatctaaatctttttcaataactttagatgctgcaagtagtgctatgttagatatatcatttttgatttcatttataaccttttgtctttcttgttctatatctttgtttgctttttcttttatatcaagagcatctttctttgcagtatttactatatcatctgatttctgctctgctcttatagttgcttgttttatgatttcttgaccttcatccttggcaaaattgatttttgactcatattcttttttcagagctaaaccttcattttttgctttttcgccttctgccaaatcacttttaatatcattttctcttgattcaattatatttaatactggcttgaataaaagctttctcagaagtaaaaatattataaaagtattaacaatttggaacacaaattcccacgttatacctactagtgctttttccataattatcctcctttccataaatcataactacttataatcacgagatgataaagttcatctcatgattataagtttgagatgatttacctataaacctatctcaaaatatttaaggactaaatctacattcctaagtatttaaagaatggatttacgaatagaagtattattgatataaccaaaccatatattgctgaagactctgctatagcaactcctagtaataaagttgatgttatatcacctttagcttctggttggtttcctactgcttctgcagctttagctgctgctataccttgacctatacctgcacctatacctgttgcaactgctatccctgctcctattgctgatgctgccgctactattgctgtttccataattatttcctccttaaaactttaattttttaaattattttatttttatcttaatataagttgatttcttaatctaactctcctgcacttgatataaataccattgttaacattataaatatatatgcttgtaacaatcctgcaaataagtcaaagtacaagtgtaatgggactggtattaatatttctccaattggtattgataatcctggtattaaactagatataaaacctaaaagttgataaaacagacccattattattgttccacctaaaatattcccaaatggacggaaacttaatgatattggtctagctaactcacctataatattgattggtaacattatggcaagtggttgagccaattctttaaagtatgataaccccttaaatttaactcctgcaaaataaatcataaaaaatgtaatcattgcccatgcagcagttgtgtctaagtcggttgttggtgaccttaatccaagtaatgggcttaaatttgaacatgcgaaaaataaaaacaagcttcctatgtatggtatcatatatggcattctttttactgtatttttacccataacatctgtaaccattttagcaagaccacctactgcaaattctaagaatatttgaactttactagttggaactttttttaagtttctagtcaaaaaataagatgctatcgctaaaaaggccattattccccaacttactagtattgtttcactaatcttaaagtttcctatgagataataatgcgcttgattcatacttatgcctccttcctctttaatttatttataaagttttttgataatatgacaaactttgtgctcaataatcccaatgctgttccgattatatttaaatgtggtactgtagctgatgcaattagaacaactgccattataaataatctaatagcatattgtgctgatgcataagcttgtgccttcccagcaggaaatgtcactgatttttccagtgatatcgccaataatctaaaatttaacatagctattatagagccaaatataagtcctaataatactggtttacttaatgttgatgttatcaacattagcacaattaaaactacatcaaatattactataccttttgttactgaccttacctggttaagtaattttatatccaatatatcacttccttcgtgtatatactattagagttttataaacaccactaaaagcacctccaacacccaacaataaaaatattattgtcagaactggagtagtattcaatttactatctaaaaattttcctaagaaagtacatcctaatattgatattacaatcatcaatcctatttgacttattaaactaaacaactttgcaatttctgtatgtgtatttcttttactcataaatagtatccctcattattataaaataaataacatgtaattaatctatctcataaatttatttaattataaaatatatcttactactaatctgatgatttttcaaatactttcttttaatcatttgataccattgtatttcagtgtcataatttgacatttattgtcatataaattttatccactaaaattttatgagttctattcctgcttcttttaataattctgtagacatatcatctggataatcaccttcataaacaattttcaatatacctgcatttatgcacatttttgcacacaaaacacaaggtcttgtagtaacatacaaagttgccccatctacactaataccattatgagcagcttgtattatcgcattttgttcagcatgtaatgctctgcataattcatgcctttctcctgagggaatatttaattcctgcctcttacatccaatattttcacagtgttcaagatttctcggagaaccattatatccagttgttaatatttgtttgtctcttacaattacagctcctacttgtcttctaatacaagttgaacgctttttcactacttctgcaatttccatgaagtattcatcccatgatggtctcataatttacttttctcctctttgcttatgtactggtattatatatttattagatttcaacctaaataaatacttatttttatattatatacacatgttaattgaatgtccaataaaaaaagagcatttttaccatttaaattttaaatacccgtcatatgctctctttaatctattaaatttattatatcatcttaataaaatattaatagctttatctaatataaattaattttggggataaatcccattgtttagtatggcttctaaaacccctccagctatacatctagctttatctgatattgtaaaagcattcttaacttcttcttttctagggtctatgtctagtatttttaaatttttgttcacctttgctccatcctttaataaacctctaaggactccagatattgttgctctaacttcatgttttttttcataattattaatataacaaagtaggtctcccttttcaactatatcacctatcttacatacattttccattataccatcatactgtgaatgcataactctctctttagaaaaaccttttattgctcctggtactcctgtatttttttctgctctaccattagttattattcttcctagattatgacctctcattgtctctataacaacatctacatcttctcctgcacaaaatccaggacctaaagctattgtaagtggtgccatatctttagttgtacctaagtttttcttagcgagtattccatcaaccaaaacgattggatttaacttagataatttttctccttttgggtctataatcaaggctactttatgttgagataaaacttcttctatttctttttcagtattgcaaaatatacattctacaccttcaacagttacttttttttcataaacagcctcacaaaaagaaatttgccttcttatagctaatggctcttctatttctaacgcaactactttaaaaccactgttgtgtaatttatgaataactgctgttgctaaatctccagcccctcttactgctatacaattcttcatgtattaccactcccaataatattattaatattcaattctcaatttaactaatacacttaatacctataatcttaatcgtaagcaactaacatgccacattaaaatagactactattctataaaaccttgtaaaataagcaatcttttttaattggtaaaaactttttattctcaattcgagaaatttatcaattcataattcctattttgagaaaaaatatataaaaaagaaccttcttacataaaattatatacactatataagaaagtccctaataaatatttatagttatttatttttatttagttccaaacaatctatctccagcatcaccaagaccaggaattatatatccatgttcatttaatctttcgtcaactgatgcaacatatatatcaacatcatcatgatatttttgcacttctgctataccttctggtgcagctactaaattagctaattttatacttttagctcctttagacttaagtaaatctatagctgctacagcagaaccccctgttgcaagcatagggtcaactactattatatctctttctcctatgtcttgaggaagcttgcaataatattcaactggttttaatgtttctgggtctctatatagtcctacatgtccaacttttgctgctggcattaagcttactaatccatctaccattccaagacctgctcttaaaattggaattattgctaattttttacctgcaactactttagatgatgttttttgaataggagtttctatttctacatcttttaatggtatatcttttgttatttcataccccattaacattgcaatttcagttaaaagctctctaaagtctttagaaccagtatttttatctctcattaaagttaatttatgttgtattaatggatggtttgtctctaccactttgctcattttgataattcctcctgataaaactgtaatttttattatttattatgtttttcttctattgatttaatcatgtttactcttctagcatgtctatcaccttcaaaatccgtattaatccatgcttcaactatctcaagtgctagaccttttcctaaaactctttcgcctaatgataacatatttgcatcattatgtgcttttgacatttttgcagaaaatacatctgatacaactgcacatcttatcccaggaaccttattagcagctaaagatattcctatccctgtaccacaacataatattccataatctacttctttatttataactgaatttgcaactatttctccataaacaggataatcaacagaatctgtagcattattagttccataatctacacattctatacctttactttctaaatagcttattatttctttttttaaattatatcctccatggtcacagcctaatcctatcttcatttgtttatcctccgtttcatattttttttactatttcgttgacagaatacattatttctctcatagtgcttctataaatatccaaatttccaccaaatgggtcagatatatcttcctcatttttatttgcaaaccctttaaaagtatacactttttctttgcattttggaactgcttgtactaaaatttctttatgagatttagtcattgttagtattatatctgattcatcaattaattttttagtaattactttacttctatgatttgataagtctataccgatttcttttagtacttctatagaattttcagaagcacccattccatttgctgtagatatacctgctgatgatatcgaatattcttcaatacttcttccagattctttaattgctttccttagtatagcctcagccatagggcttctacaagtattacctgtacacacaataagtatattcatattttacaactccctcttaagcctttatcactttgtatcctgctgacttcagtagtctattcataattgcttgtccaactccagtcttagggaactcttctgaatatatgacatcaacgccctttttgtccatttctataagagcatcaaacagattacttgcaacttcttcaagagagtttcctaaatcgattacttctccatcataaaactctcggtttctactgatacacattacacctgtctttagacctttgtctctattagattttatcatatcattaatctttgttgctacattttctctttttccagatattatatatacatctgcatttggagaataatgtttatatttcattccaggagctttagctttttgattatcttcttttttacttaatgatgggtcaagctttacttctccaagaagttcctctaaaacttctttagttatacttcctggtctcagtatcataggagtctcttctgttaaatccaatacagttgactccaatccaaaattactgtctcctcctaaaactattccatccactcttccattcatctcttcatatacatgttttgcttttgttggagatgggcgacctgagatatttgcagaaggagctgcaataggtataccagcttcttttattattgccctggcaataacattagaaggcatccttattgcaactgtatcaagccctccactagttttgtatggaattatatcttttttatttaatataattgttataggtcctggccaaagcttttctataacaagtttagctttatcacttatatctttggctaagtcatatacttcttctttttcatatatatggactatcaatggattgtcactaggtcttcctttagcttcataaatcttctttactgcattttcatctaatgcatttgcacccaacccatatactgtctcagttggaaaaataactgttttaccttctctaagaagttttgcttgtatttttatttcctcataatcaatattatttatatcaatattacttataatagttttcatcttttgtatgcctgctttcattttaattttatatataatttacaatcattgtacctaacaagaaaccaattatacaatacacactttttgaatgtggaaaaatttcttccaatacaacatacatcatagtacctcctgctgtagcaagaaatactcctataagagaagtaaatactcctccaaaataaacacctaaaaaacttcctagacccataggtaatccagctattacagtaaacaaaataactttacttagtttcattttattgcaaactaagcctaatgccatagctaacccttctggtatattatgtagacctataactatagcaagtgtaatacctaaactttcagttgacataaaagaagaaccaatggctagtccttctggtaaattatgtagtaatatacttatgaatataagatatccagatgccatatttccagacacatctaattttgtttttatgtacatagttatgagagctccaacaaacgtaaatataactgtattgattatccccattttgtccatggattctttcattaaatcaaacaccactacagccaacattattccaccagataatcccataaaaaaacttagatatttatcgacctctcttttaaaaatggctgatattactcctcctaatcctgtccctataacacctgccaaaagcccaattattgttacttttagtatcatataaccctcctatacttgtatataacaattatatacaatagaatatgataacatgacctaaaatgcaaaatagctgtttcaaaatagaaaataatttctaggaagaaacagcttctttaaaacattacttatattgcagtcattttttctgtttggtcaacagtaattaaagcatctatcatttcatctatatctccatctaaaaatgcatctaacttatataaagttaaatttattctatggtcacttattctaccttgagggaaattatatgttcttattctttctgacctgtctcctgttccgacttggctttttctttctgctgctatatctttgtgttgttctgccaatgctttatcgtaaagtctagcttttaatatttttaaagcttgctctttattttttaattgtgattttccatcttgacaagatactacttcacctgtaggtatatgtgttaccctaacagcagagtcagtagtattgacactttgtcctccattacccgaagaacggaaaacatctattcttaaatcatttggatttatttcaacctctacatcttcaacttctggtaatactgcaacagtagaagttgatgtgtgtattcttccaccagattcagttgatggtattctttgaactctatgaactccagattcatactttaatcttgaataagcacctttaccttttatcataaaagatacttctttatatccaccaactccagtatcacttgcactcaataattctattttccatcttcttctttcagcataccttgagtacattctaaataaatcacccgcaaatagagctgcttcatctcctccagctccacctctaatttcaactataacgttcttatcatcattagggtctttaggcaataatagtatttttatttcttcctccagaggtgctactttttcttccatctcagctaactccattttagctaattctcttaattcttcatctgactcttcttgtaaaatttcttttgattcttttatactatctaaaacgcttttatactctctgtatttcataacaataggttccaagtcagcatgttcttttatatatttctgccaaactttttgatcatttattacatccggatcacctattttttcacttaagtctttatatgtatcttccaatacctctaatttttttaacatactttcacctcgattaaatgtaacatatcaattgttgattatatcatatattgtaacctataacaactctatcaatgccttgaatatccttctttgtgtatatttttttatatccattacttttcataatatttattacatcttcagcttgattatgaccaacttcatatgctaatattccacacttatttaaatatttcttaccttgttctgttattcttctataaaagtctaatccatcttctccaccttcaagagcattatatggttcataatctttaacttgtttgtgcagagtttctatatcttgttttttaatatatggtggatttgaaactatgatatcgaattttatgttactatcacttattgctgtaaataaatcagaattaatatactttattttttcaccaacttcatttataatagcattttttttagctatttctaatgctgtctctgatatatcaaaagacatgattttagaattttcaatgtactttgctaaacttattgtaatagctccagaaccagttcctatatctaatatacttacatcttttttttctctacatatttcaattatttcttctactaaagtttctgtatctggtcttggaatcaatacgccttccttaacaaaaaaatctaatcccataaactccctattttcaactatatatgctattggtcttccatttaatctttcttctgcaaaacccataaattttgttttttgttcttcagttagctctttattcagatttaagtgaatatataatctatcaacacccaatgttttttgtaacaataactctgtatctaatcttggagtatcacttatatcttttagtttatctgaatatttaataattatatcttttatcgtcataacaaatatccttttctctaatctactactgctttcaatgcttccaaagcaacctctaattgctcatcatcaggctcttttgttgtaaaatattgcaacatcattcctggatatgcaataattttagtaaatccattatcatatttcccaagaactctaattacctcataagataaacctgctactataggcacacatataattctcataaatattctaagaattggatttggccaaccaaaaaatgcaaacaatattattgatacagccataactataaataggaaatttgtaccacatctaggatgtaatcttttaaattttctagcattctctactgtaagttctaaatcattttcatagcaatatatagatttatgttctgctccatgatattgaaagactctttctatatccttacttcgtgaaatcaatactatatatgcaaataatatagctatccttatgattccttctattaaattaagcataaaatcattaggcattactttagaaaaagctcctcctaccaatgtaggtataaaaatgaataatccagcagaaagtaacattgctatgaccaatgaaaatattataattatatcatttgccttatctttaaaaattttctttataaataaatcaaatttatcctcttcagcttcttccataaaaaactctgaagaaaagtttaaactttttatcccttgaatcattgtatctatcataacaaaagaacctctaacaaaaggtatcttatctatattcttatctcttacccaactttttattctatcttcttttagtgctatttctccgtcactttttctaacagctaccgctcttttgtcttttgactgcatcattacaccttcaataacagcttgcccacctacagcttgttttgccatccactcacctcattttattgtatttagaatactcaattttacatatttattattataatacaaaaagacaatttaaagtagaatatgaatgtttttttgtaataaaataggagttggcttcctccaactccacttttataaaaattagtccattttgaatcttttcttgaatttgtcgattcttccacctttttctatgttcttttgttttcctgtatagaatggatggcactctgaacatatttcaacttttatttcgtccttagttgaaccagcaacaaatgtgttcccacaagcacaacgcacttcaactggattgtattttggttgtatttccttttgcattatagtcacctcttctctttatttaaaaaaattaattatattaactttctttttacattatcaactacattattatagcacaacttattatgccattcaagtgatttttctattagtttatataatccatatttgcatttgtattattgattttacaaattctttattgattttacaaactctttattgtccttagttctctttataagttcaatgactttatctgtaatttccattactgaattattactcatttctcttcttaatctccaaagagcagtcttttcttcatcatcaagcaataaatcatctcttcttgtaccagacttgtaaatatctattgcagggaatattcttttttctgctaattttctatctaaatgtagctccatatttcctgtacctttaaattcctcaaatattacatcatccatcctagaaccagtttcaaccaatgctgttcctaatattgtcaaagaaccaccctgtctaatattccttgctgcaccaaagaactttttaggtccatgaagtgcaccagggtcaatacctccagataaagttctacctgtaggagatattgtaaggttatatgcccttgccaatctagttatactatctagtaaaattactacatctttaccatgttcaactaatctttgagctctatttaacaccatctctgcaaccttgacatgatgacttgatacttggtcaaaagttgaatatataacgtctccttcaatagattctttcatatcagtaacttcctctggtctttcatctataaggagtactataagttcaacatttggatgatttttagctatgctatttgcaacgctttttaaaagaactgttttcccagcctttggaggtgctactatcaatcctctttgtccctttcctataggtgaaattaaatctataattcttgtagctatttcatttctattagtttccagtgtaagtcgttcttctggaaatattggtgttaatgtctcaaacgcatttctttgtatagctgtgtcagggttttcatcatttattttttgaacatataaaagtgctctaaatttctctccactttttggatgtctagttattcccttaatcttgtctcctgttttcatattaaatcttcttatttgagatggtgaaacataaacatctccttcagtagacaaataatttgaacctcttaaaaaaccaaatccatctggcagaatttcaagtacacctactacttcatcctcttttgatgtgttaaattcatctactatcttagattcatcaacttgtttaggcatataatagtttttattattatttctgaccattctattagatatatttgatgacttattactatcatttacactcgttgtcttattatagtcatttctttgatttctattttcttggttttgggaaatattttgggtatctatttctttcttgttgtatgatttggtagggctcttatattcaacttctttttctatactttcacgctctatattttcttttctattctttatgtcttctttaatatcttcatttttttctttagtctcttcgtttactttttcctcatttttacttttggaatttataatctcaattaactcatttttcttatatgtagtaattgattttatttttaattctttagctatctctcgtagctcaactaaggtcttactacctaatccttctaatactttatcatctaaaatcaaaaaaatcctcctcatctatatattcatttatatacatacttattttggaaattgaaggcatgaaaaagaaaagttttatttaaacagttaagtctaataatatcattatttatatattatggtcaataaataaaatttaaaacattattacctactatattactgtatttcaagtccaatcttagcacgtttttataaatttatcactatatttatatcttataataatattttcctttaaaatatgcaactattataaaaatttttttttacatttataaattctaaaaaccatatataactaaaatattgtaagtttttgactacatcaagttatatatggtttttatatttatgtatatcaactgctgtcatttatcttattacatagttgcaatcatactcaaaacagctgttatactcgttattacgaggattcccacaatcccaacagctattattctattaattcttttctgacttgattttgccaccatacatcacctttcattaattatttttgaatttcaagttctctagcttcattgacttcaattaaatctattttttcatctgtattattgtataacacattgttatttttatcaaattcactacatacatgtttcaaatattttataaaatcttccttaaggtcttctttctttagagcaaagtcaacagtagcttctaaaaatcctagcttgtccccaacatcatatctcttgccttcaaaattgtatgcatacatagcttctttcttagataatatttttaaagcatctgtaagttgtacctctccacctttacctggtggtaaatccttaagaatatcaaagatttcaggagttattatatatctacctaaaatagcaatatttgaaggagcttttcctgactctggcttttctaccatgtcttttaccttgtaaactctaccttctatattttttgcttctattatcccatatttattagtatcttcttgatttaccttttgaacacccaatattgtagttctatattcctcatatgcatctgttagttgttttagacaaggtacatcattatctacaatatcatcccctaacattactgcaaacggctcatcacctataaaatgcctcgcacaataaattgcatctcccaatccttttggctctttttgtcttatataatgtatgttaatcatgttagatatgttttgtactacctccaacaattctttcttaccttttttctctaaatcaagttccaattctacagatttatcaaagtggtcttcaatagattttttatttctacctgttattattagtatttcctctattcctgaggccacagcttcttctattatgtattgtagagttggcttatcaactattggtaacatctcttttggttgtgcctttgtagctggcaaaaatctagttcctaaacctgctgctggtattacagcctttttaactttaacttgcatagaatcatctcccactaattaataaataaaaagtcctatcttgataggactttaaacttttagtatattttatcattaattcgatatatttaccatgtggattacaataatgtttataatagcttttcaagttctgctactaaactatcaaattttttgattgtattttctatgggttttgtattagttaaatttatgccacttgattttaacaagtttattggataatctgaacttccctttttaagaaagctcatatagttatctgaaccattctttaggatgtcttgggcaaaacttactcctgcactacaacctgtagcatatttatagacatagaaactattataaaaatgtgggattctagcccatccgaccttagataattggtctaattcatagctttgtccataatattttttaagaagttgtccccaaacatcatttaatactaatgcgtttacactttttcctttttctactaactcgtgtatagttttttcaaattcagcatacatagtttgtgtataaagagtatcttttatcaagtctaaatactgtgttatataataagctttttcatcattgcctttagcttcttttataagcatctcgtaaagtaatgcttcattcgttgtagatgcaacttcgtgagtaaatatagacggatttgaattaaaataattctgattcttagaacttaagtattcatatacagcatgtccaagctcatgtgataaagtcgaaactgaacctaatgaattattataatttaaaagtatatatggatgattttcataaacagataagcagtatccaccacttactttattttcatgtgaataaacatctatccatttttcattgaaagctttatatactacatcattgtattcttttcctaaaggtgacaacgctgaatatactatactttgtgccttttcataattaatattattatcaacagccttaaccataggcacaaacatatcatatgaatgaaccttatctaattttaatactttttttcttaaatctatatatttgtgtagactgtccatattactatttacagtccttatcaaattattgtatactttttcatctacattatcagattccaagtacatttctaaagaagactcataacctctttcctgagaataaaaaatattctttttaacttgaccagtaattaaacctgcaattgtatttatattatcattgtaagttataagttcatcttgataagctttttttctattttctctatctactgactctaattcacttgcatattgcgctggtgtcaaattagtttttctatccatatttctaaataattcatatacttggcttggaagactacttattgaagatactttgcttagaatatcttctgatttatcatccaaataatgtactttattccttcttatatctcttaaatatgcaccatatttcctatttatatttttatttgaaataattttcttgtaatctttgtttgataattttagtatttctaattctaaatctgaacaaatccccatataattcccatatgatttactcatactatcactcatatctaagtacttatatgaatttttattagtatcttgttttaattttacataggcagaaagtttatttagtcttatatcaagtttttccttaatgtttaaggcaaaagacaaatgtgttggcgattttgttactttacctatgtaatttttcaactctttagtatctttatcaaaactcttaagttcttttttccattggtcatcacttttgaacaaagattgcaaattccaacatgttttttcatagtctacttcttgttttttttcagcatcatcttcagtatcattattattcatgacagcaattgctctgtcattattcttttgatatccttggtcagcttttatacttattattaacatgcaaaaaatagaaataaataaaggtattattgctttgcacaattttctattcataaaaagccatcctttcaataaatttacttaataataggatggctttttttagatatattattcaattattcatactatataaataaatatcgaattaatagttatccacataataatcaacatattcacaggttttctttacttagaaatttagttatttcaacatgaatctcttttgataatagcttttgttttttctttttttacattttattaacatttctgccatacttatcaacaaattttgttgatttatatgttatttttgttaataactatacttttttcaaaagtctattaacatattatacacaagttatccacatcttatacacataatcttgtaaaccttattttgtacatattttcgtaactaaaacagtcatgtcatcttcgatttgtaacgcttgtaactctaatgctctatccaatattaaatttgaaatttcctttggatttgtagtctctatattctttaagaagtatattaaccaattgtctcctaaattgttatttcttcctgcatctacaattccatcagaaaccattataacatagtctccttccttaacttttacattttttctatcaatttttacatctgataatatacccacaggtaatgatgatgatgatattaagtcaacttctccatcctctctttttatataagtagaacacgctcccatctttatagtttctaaacaacctcgttttaaatctaaaattcccaaatccagagttgaaaacatctcttctgaagattttaacaacaacatattatttatagtatcaatgactatctcatctttaatttttgcatctatcattttttccagtatatcaatagtggcagaagattcttcatatgcttttttaccctttcccataccatcacttatagccatcatgtatttaccatcatttatctccatgtatgtgtaattgtctccacaaaggatatgcccatcccttgacattgctgaaacttctgtaacagccttatatttttgagatttaacgaatgttgccttgcatttacctcctaaacagtgacatcctatttttctaacagacatattttcacctactaggtctgaaattatatttacaattttatcttcacacatacatccatcatgacaagttttcttttctattgatatttcaaactcattgttactttttgttaagtaacttactttatcaactgttatatcatatctttctaactgttcatatatatttttttccttttctatatctagcattatgtcaccttctaaatcttgagataaggatttaatggattttgaaatacttcttatctgatttgctattaactttctactttctgaaaacttcacactccaatcataatctaatacaaacattttgtaatagtgatttgatattttcactatcgactctggtttcatacattcctttctaaaatttttaggtatatcgtttagacttaactcccctttctcctcaattttttcaagaatgttatatatcatagtgtatgtatgattaaatcttgactcccagcacattcttctcatactacaacttttacattcatcattatgaatcatatctattacattagctatatctctttggtctagcactttgtctttttctcttatcttatcaaatgtatctgcaaggtcatcataagttttataaatactgttcaatctgctattagttaggtttttgcttctcataatataatcgtatacgatttcatttgaagccacattactttttattaatttttcaatcttattaaataatctctctggcaatactagtactatcaaacaacctaatagtatatctcttaattgcatcatattagaagtaataccagaagtatataggtatattattgtccaacttagaatatatcctagtatacagaaatatttatttattttattaaatgctccacttattaatcctgaaaaagaatatatccccatataaacagctgatgtcatattatttaaaatggatgctacaccaataattacaccactagatgctcccatggtagctccacctactattgaggtcagcaatatcaatacggtcgataaaatggtccttattgatattccaaacagagatatatctcctattcccattatgctaaaggttagcagtaaacttattgatatagcttcttctgtccgtacagacatcctattgttgacattggccattaaacctatcccataagaaaacacatatatagatataaacattattattgcttctactcctgctataagaagaccatatacatacctatttgaaaagaaagcttgtcccatggagattggaagtagtattattgcacctataaatgcaaccttagcaattgaatctgataattttaattttttattcatagccataaatattgtaaggcacacagcatattttgctacatttccaaaatcattagatgataacaatattcctaataatgttgatatgaatacaggtatcttgtacttatcaatctttgatgcacatataaaaaaggcaattcctaaaggagctacagagtctactataatagacctactaagtaaaaatcccatcacagcgaatgccgccgtagtaaaatcaatatatccgcttattaattttatgacatttggttttacagtcttattcttcacaactgctacacttctttgcataaaaaaacctcctcttttgtttatattaagaattgtaacaaagaggagtaattttttttgtcataatcggttttaaaaatcaaaaaatattaatacattttttttgacttttgacatattaagccttccaaattatcgtattcacttacggttatttcttctatttctaatttttccattattatattcaatatttttacaccagcagttataatatccgcacgtttttcttgtagcccttttaagttctttttatcacttaatgtcatctttattaatttttgtagaatttcttctatttcttttttgtgtattttactattatgtattttttccatagagtaaatctctaattcttgattcattgctgataatgatgtaatcgtacctcctatacctataagagtttttaatcctctgtcttttatatgatttaacgttttgtcaatctcatcatatataaatgaactcatagcttcaaactcttcatcttcaataatatcgtgcttcaaaaacctctctgtcatcctaagagcacctacattctcacttttattaaatttaattccttctgaatcacctacaataaattctgttgaacctcctccaatatctataacaataatagtatcatcaccttgtattccttctaaaacacccttaaagcccaaatttgattcttctattcccgtaactatatcaacatctattccagtttcttctttagctaatttaacaaagtaatctccatttttactgtctctaagagcagatgtccccatacaataaattttttcacacttttcatcattacacttatcagaaaattcttttaatgcttttatatttcttttgatagcatcttcttttatatatcctttactatccacaccataaccgattctagttgtattaacaaatttttttctgtttataaaattcccatctctataatctgctatcagtaatctcattgagtttgtcccaatatctatagctcctactttcattatgaaattccctcctcaataaaaacaaaaagccatccttaactgaatgacttttttattaaatcttaaattttaaaatcaatacatctgtaaacttattagcaagttttaatcaacgatttatgtctacataaactgtttcatttggttttaccatattcaatctttttcttgctatatcctctaagtctccttcatatgatttttcatctttctttaagctgtttatttgtatttcagtcttttttaattgtttatttagacttgctatttcttttttatattccttagcttttgtatactcaaatacaaatcctgtcatcatactaaaaattgatattcctaaaaataaactgataacaataatctgtcctgaaaatttttttcttaagttcatttttcctacaccctttttttagttttattttttttcttcttaggttttgattttttcttgttctttaattttttatttgattttctttttatactttttcttgttgctataaatatgtttggtatataaaatataatatcaaatagtaggtgtagtgaatagattataacgtaatacaaattatttaaaaaactgactatgtaatgtgtaacttttttaaaagaatttctcacaaaacgaattattttattgataattgataaaacaattttacttatggtgttatagtataaaataaaaccaataaacaaagccacaaaatgataatatcttaaatcaaaaaattctgtaaggtttattgttacgaatattataaccgtagctagaaaccaaaacaatacatcaaagattatagcaaaataattgatgaatttaaaattccctcttagccctctataaaaatcaaacaacacccctatgagtattccaccataaatagtagcataaaaaatgcttacatcttgagtaaaaggtatcatctatctaaatacctttttcaagaaactctcttgtggctttttaggctttgcatataccatagaatttatagttccatctatgctaattatattttcgtctatacttagcttgctcatatctaggttttcgccttcaattaccatctcgcctacagaagttttgagctctactcttttgtcattaaaagagtatatgtgctcgactcccgaaataaccagctttgatctatctttcaaagttatgttctgttccataatatccccccagtaaatatttcaataatactactattaatatactagaggactattaattttattctaaaatttcgtacatttcttttgcatcattttttaatacatgctcttttacttcatttatcttaaacttcatcttcttctctccaaattgtatttctaatgtatctccaatattcacctctgaagaagatttagcaacttttccatttatagtgacaatccctttatcacatgcatctttagcaacagttcttctttttataatcctagatacttttaaaaatttatctaatctcataattatcaccttccttggttctatagaaaaagtgtggcaaatttatccacactttttcacaagatttctaattatccatttattatatcctttaatccttttccagctttgaaaactggtgctttagaagctggtatatctataacttgctctggatctcttggatttcttccttgtctagcagctctttctcttgtctcaaatgttccaaatccaactaattgaactttttcattatttactagtgcatcttgaacagaactcataaatgcgtttaacgcagcttctgcttccttctttgttaatccacttttttctgccatctttgatactaattcagctttattcacgatatttacctcctaaaaatgtttataatatagacttctatctttgtgataaaagttctagatttttgacaaatttccttccacaattttattgttttttagcctgattccaaaactcatccatctcttcaagtgtcatgtcttctaattttttattcaagttcattgcacttttttctataaagtcaaatctatttatgaatttttctgtagtacagttcaaggcttctcctgagtctatgtctaaaaatctagctagatttactatcgaaaataataaatcgcctagctcttcctttatgtattttatattcccgaccctgtgttcgtcaagtaattcctgatattcttcttcaatttttttaaatacatcttctacattgtcccaatcaaagccgacaagtgctgctttatgttgaactttactagccttcataagagctggtaaatgttttggtatccttctaaggccatctgttatagtactttcgcctttctcttctttctttaattcttcccaagttttctcaaacttagacatatctaattttgcaccactaaatatatgaggatgtctatgaattaattttttacatatgccatttactacttcttttaaatcaaagtagccctcctcatttcctatctgacaatggaatataacctgtaaaagaacatcacctaactcttctaccatttcatctatatcattattatcaattgcattacaaagttcatatgcttcctctataacagaattttttaatgattgatgtgtttgttttttatcccattcacatccagatggacttctaagtgtattaactattatttctaagtcatgtactgtattatacatctttttagaacttttgggtatatataagctagttaaatagtcaaaaaagttttcatttctgtctaattcacaaagctttataaactttttactttctaaatctttgacacctgctccatttactatacatacttcttgattatagtcataatgttccataagttttaactttacattagatgctataaatttatcatatacctgagttattatcatgcttgtatccaagtctatatatgaattttctatttcaaaagcatctaccagtttaaatccctcagatgggtctatagccaaatagttaaacatagcgtctacaaagctcatagaaggcaatatttctactgctatgtgcttttcattggctaatctctctattatacttacagtcttctctgcaactcttggatgaccaggaacagcatacactaggtcaccctttgctgattcttctatgataaattcagatattttcaaataaacattatcaaaattttcctctttttcataaaagtagtctaaagaagtgtattgtatagtttctttaagtttatcaattattggatgtttctctgttctaaaaaaaactttagggctatttattaaagattctaacacaccttggcttataagagaatagtctcctggtccaagacctacaatacttatcttacccataacatcactcctattagcaaatttcactttatttttatattattatacaaataaggagatttactatttgtatagtatttcctttatttgcatatatattcctatattatcttataagtttaactttttttaacaatttatataatttatcaccttttggcatagttagaatctcttcttttttaattccacctattccaagtattactactacatatacaattccaccaacacatattgcaattattgtagatatgctgtttcctaagaatccaactaaagcaccataactcaacttaaccattataaacattgtcataactgttataaatggctttattataaattcttttttagaaaagtttacattcatgtgttttttaacatatagtaagttaatcatggctgccacaaagtatgctgtaactgtaccaaatgctgaacccagtacattaatatctggtatacctgttaaagtataacttattacaattttacatagcataccaacacataaagcaattacaggtactattggttttcccattccctgaattataccagtcaatgtctgtattaatcctaaaaataatacacatggagtaagagtaaacaaaatagttcctacagaagatggttcatgtggaaataaaagacccattattggtattgctaaagaagccataccaaacgcacaaggcaatactataagtaaagttaccttaactgcactcttagtatcttttctagcttttgacttatttcctaatgcatatgctttagaaattgctggaactaagctcatactcattgcagttgttatgactgctggtaaatttattgtggccattgccatacctgttaattgaccaaacattgaatttgccactttgtatgtaaatcctgcttccataagtcttcttattacaataacattatctatcatatttacaagtggcattactgatgctcctattgttataggaatggcaacagttaaaagctttttaaaaatataagacactctttcatctttaaatctttggcttgcatctatctctgctctacgctcttttctccctagcatataagcaaacaccaaataaagcatagatgctattgaacctattgtagcccctgatatagcacctgctgcaccaaaagtctgacctagactcttcataagcaagtaggccaaagtaagacctaatacaactctaaaaaattgctctgcaacttgagacacagcaatcttagtcatatcttgtctcccttgaaaatatcctctatatgcagacattgcaggaacaaatagtaatgctggagcaatggctttcatagagtataacgcacctggatttttcattacgtttgttactatgtagtcggctccaaaaaataatatacaaaatgatattataccggtaatgaataaaactgtatgtgataccttaaatatcttatttgcacctttaaaatttccaattgcaactttttccgaaaccaattttgccacagctgttggaaatccagcagtagctaatgttaaaaatagagtatacacaggataagcagcctgatagtatcccattccttctgaaccaatcatgtttccaaggggaatcctaaaaaatccacccattatttttacgattacacctgctagcccaagtataagggctccttttagaaaggagtctttatttttgttattgttcataacataacctccatactgtttatataacaaactttaatataccatatttttaatgctatattcaatattttacacaaaaacttcaaaagaccttcatgtaaaaggtctttatgataaaattattgaacttgttttcctaaaaagttagcagcaatttttaaagatttttcttcactttctgcaattgtatctttatcctttgaaacaactacaattgaacctatacagtcaccagatgcactaattataggcatgataacttgactagtatattctttttggtcttccttgaataatggtaaaatgtttttatcttttgaatattttactgttctttcacttattattgcttctaactcatcacttatacttttttctttataatcttttttaggaagcttagacacagctattatagaatctaagtctgttatcaacactccatatcctagtacttcagctaatgtttcagcatattcttgcgaaaattcatttaattcacctattggagagtattttttaagtatgacttctccatcttttgctgtgaatatctctaaagggtctccttctctaattcttaatgtctttcttatctcttttgggataactacccttccaagatcatctattcttctaactatacctgttgctttcatattttttaatccctccataaattactttaagtttatttttaccattgttaagaaaaatatacaaaaaaagctatatcttatccagatatagcttttttaagcatattactctttttttaagtcttagattgtgattttatttattactttttcatctttttctaccttagcttctttagttaatttttctatttgttcttgatatttatttttcaacagttggtcttttatagtttctttagcatcttcaaatgatgtttgctcatttattctgtctgtcactttaattatgtggtatccatattgagtttcaactaaatcagatacttcaccctttttcatagaaaaagcagcatcttcaaattcagcaaccatttgcccccttgaaaagaatcctaatttaccaccatcacttgctgaagtatcttgtgaatatttttttgctacttttgcaaaatcctcacctgatttaacttctttaagagcctcttcagcctttttcttagcttcagctttttccttatctgaaagtggcttgttattatcatctactgttttcaataaaatatgagaagcttctacctcatcttttttaaattcatctttatgtgtatcatagtattttttcatttcttcatctgatattttagtctttttagcaaagttactttgatagttttgcattgctaaatctttctcttgttggtctcttaaaaactcatcatctatacctaatttcttaagttgttctttatatttttcatctttacccatagcgtcttttaattctttaaaacttttttcaacatcctcttttttaggaagtaagttatcttttttagcttgagaatatattacttctgtagttataagttggtcaagaattaaatctttaaacttgtccttgtattttacacccttttcaacttccttatcccatatatcttttccataagtttgttccatagaatctttataaagagctatagtttttttaaattcatctgatgatatctttgtaccttcaactgttgccacagtttctcctttactagaactgcaagcagtcacagatactaccaaaatcatagctattaccaatgttattacttttttcaaatttaaaacatcccttcttaaatttacaagttattttaccttgcacatcttttctaataattcttctaattctgtaactatattataacctattttctgtttagttctatactttgttattggaactaataatatttcatcttttaattgtcttatcttttctatttttaatatcttacataacgattttatataagctattgtaagaagtgtctggactggtttaggtatatcagagaatctatcctcaagttcttcttgtatatccaacatgtcttctttgttttcaatagaagctattttcttatacatttcaattttaatcaactcatctttgatataattatctggaatgtatgcatttacacttaaatctatttcaacatcaatttcctccacaataggttcacctttgacttttttaattgcatcattaagcattttaacgtacaaatcataacctataactgccatatgaccatgttgttgagaacctaaaatatttcctgctcctcttatttcgaggtctctcattgctattttaaaaccagaaccaaactctgtaaattctctgatagcttttaatctcttctccgctatctcacttaaagttttatctttttcatacaaaagatatgcatatccttgtcttgaacttcttccaaccctacctctcaattggtaaagttgagccaatcccattttatctgcatcatatataatcattgtatttgcatttgatatgtccataccagtttcaattattgtagtacagactagtacatcataatctttatttaaaaatcctaggattatattttctaatgatttagaagtcattcttccatgtgcaacagccactctagcatctggtacgagtttttgaatcatacttgccatttcttcaatgtgttcaactctattgtatacaaaaaatacctgtccacctctacttaattctctctctatctcatcttgaattacgctttccttactctctgtaacatatgttattacaggatgtctttcttgtggaggttcttctataacactcatgtctcttattccacttaaagacatatgtaatgttcttggtataggagttgctgaaagtgtaagtacatctactgtagatttaattttctttaaagcttctttatgttttactccaaatctttgttcttcatcaatgactacaagacctaagtttggtaaatttatatctttggatattattctatgtgttccaattaaaatatctactaatccttttttagcatcttcaataatctgtttttgttgttttggtgttttaaacctacttaaaacttctactctcaaaggataattttcaaacctctctttgaatgtattataatgttgttgggccaatattgttgttggaaccaatacagcaacttgtttttggtccatacaagctttaaaaatacttctaatagctacctctgtttttccataaccaacatctccacatactagcctatccattaccttacttgattccatatcttttttagtttcttctatagcctttaattggtcttctgtttcttgatatggaaacaacgattcaaactctgcctgccaaggtgtatcttttgaaaacttatacccttgtattttttcacgttttgcataaagctcaatcaagtcttttgtcatatcttcaatttcttttttaacttttgcttttgctttcgtccactcatttgttccaagcttatttaacttaactttttctacttctgcaccaatatatttttgtactttgtccatctggtctattggcacatatagattatctccaccttgatatactattttcatataatcttttttaatagcattgactgtaatttgttcaatccctgtgtatctacctacaccactattttcatgaactacatagtctccaacacttaaatctaaaaaggattctattttctttccttttttaacttttttattgctagtcttagacgctcttttataaacacctatcatttcgttatctgttataacaacaaactttatagatttatactgaaaaccactgtttatgtgtgcaggtacaattataacttgtgaagatttaatttcaatatctctatctttagaaatggtcgtttctaagcctttgtccaataaatcttttcctaatttatttgctctttctaaggtatttgttgctaaaattattttgtatccattatatttcagccgatttaattcttctacaagcaaatctacctttccattaaatgtaggaacttctctactttcaaaatttattatagattttatagaaaagttatttatagactttggcaatagcgagtttaataccacagacttgtcttttactaagtactctaaatctgtatagtgatataacaatttaccttggtttttaatagccagacctctttcaagatttaatttataattttctctaaactcatttatataattttcgcatctttctttaagtctcgttatatcattaataaatactattgcatcatctgctaaataagtaaatatacttttgttttcttctggataaatataatctatatagttctctgcaccttcaaaataagtcttacttgatatataatctatattttgaaatgtaccttcatcagtatttttagttgtttctttttttaatttaactaatgcatctgtagttttttcgggataaataaattctctagatggagttatagagaattgttgcaatttatcaattgatttttgtgaatatacgtcaaaagttcgtatggaatctatctcatcatcaaataattccatacgaattggatttgtatattcaagtgaaaatacatcaataattccacctcttatactaaattgaccaaacccctctatttttgaaactctttcatatcccaatgaaactaatttctcagttaacttttctaagtctaagctatctcccaccttataatgagatacactatcgagcaaaacttgttttggtatgtattttcttaaaactgcctcaatagaagttactaaaatgattttttctttatttgctagttttaacaatacttttaatttctttgcttcttcgtttctgtcctttgcatccaagtgataaaaataaatatcttgaaaacctaaatattcaactttatcttccatataaaaacttaaatcttcgtatactttctttgcttctaaatcactactcgttataaaaatcatttgtcgtgataaatcattaaatatagaatacgatatatgaggtttttgtactggtaaaagtccattaaccaataatgagccttttgtattttttatacagtttattatatctttatactcttttgaattttgcaaaggatataaaaaaacatcattcatttaaatctccctctcactatccattatatttgttcatagacatatctatattttctcttattattgagtcaatagcatctgccgctttttctaatgcttcatttatgttatcagattcttcttttctaaatctagaaagtacaaagtctgctaagtcttgaccagcttctggtttagatacacctactctcactcttggaaagtcatttgaacctaggcacttagttatagatttcatgccattatgagttcctccacttcctttttttcttatacgtatctttccaacttctaaatctatatcatcatatactactactatattacttaaatcaaccttataatatttatatatatctattaatgtttctccacttaaattcatataagtttgtggtttaactaataatactttttcagtacctactctcccttcaccaatcaaagctttatgctttattttagtaacactaatattgtattctttagcaagaatatctataacatcaaatccaacgttatgtctagtcttctcatacttctttcctggattacctaaccctactactacgtacatttcttacctcctgttatataaatttgtataacaaattataataaaaattaaatatattatactctgtaaatattattaaaattgttgacaaggaaataaaaggtgtaaaaggaatttgctttcttatatctacatctttaaatattttagttatgtataaaataataaaaaacaaaaacgctaaaataaatgataaaactatcacataaaacccataattatttcccaatgcaaagcaacataagctatagagacctacatctccatagcctaatccttttgttagtttagcaataatataaggtataataaagcctatcaatagtccaaatatatgatttatataatcaaattgagctatattgaaaaaggccaaaaaaattataccttgaactattataccactaactattgttatatcatatacatatattgtgtagtaatctacaatggatataattattaaaaatggaattaaaaccatatattgtacacattctacactaatcccaaattttagatatattaatacagataaaactacagttattatgtaaataaaaaacgtattatataaatttttcttttctctatcacaaaaaacacatagagatttatttatcaaatgtgcaaaaaataaggaaattattattatatactccatagtttgtagcactttagtaatagggttaataataatattgtccttattaaatactttaattcatttttttaaattaaaactttatttaacttgactatcatctatataaccatagaaaaataaagttcaagtaattgctttccacataagattgttattaatgctccaatagatataaaaggtccatatggtataacagaattatattcctttccttttattctacttataattattacacagattccatagactgctcctacataaacgcttagtaaggctgtcaaaagaccatttttaacacccatgtaaaggcctagcattgcaaatagtttgatatctcctccacccatacactctttttttattacaaattcaatcaaaagaactataatccagacacttcctccacaaataaaaacacctagaattgaatccttaactggaatttctttaaataaaaggttaaaaatcatagaaaatatagctccaaaaatcaatattttatctggtattataaagtggtcaatatctataaatgtaattataatcagtaaagacacaagaaccaaataataaatagttgatgtagatattccatataacataaatactgttaaaaataaaattcctgtaattaattccactatagcatatctactagaaattttctcataacaatatctacactttctgccactcatcaaatagcttagcactggtattaagtctattggctttagtctagtattacaactcatacaatgggaaggaggtctagaaatagatataccttctggaatcctaaaaatacagacgttaaagaaacttccaaacactatacccactataaatacatatagattaacgattataatatccattgtagtttactccacctatcattcttgtcataaactcttggtcagtacacctactaagtgccatatcttttgtaatctttccatttttataaagttccattaaatcttggtccatagttttcatacctactttaactccagtttgtatcatgtttggaatttgatatgttttgccttcccttatcaagttttttattgctggagtagcaaacatcaattcaattgctgctattctgcctttcccatctgctgtaggaagtaactgctgtgataccacaccttcacaaactgtagataactgtgtttttatttgttgctgttgggatggttgaaacatgtctactattctatcaattgtcttagctgcccctactgtatgtagtgttgaaaatactaaatgacctgtttctgctgctgttaatgctattgaaacagtttcagggtctctcatctctcctattagtattacatctgggtcctgacgcaaaatagctctaagggctgaatgaaaactttctgtatcagttcctacttctctttgatttactaaactttgtttatgatgatgtacatattctatcgggtcttcaagtgtaattatatgtttttgttgtttttcatttattatatttatcatacttgcaagtgttgtacttttaccacttcctgttggacctgtaactaaaactaatcctttatgcttttcagtaaaagattttatactctctggaaggcctaatttttcaaatgttggaatttctgctgttatagtccttattgctattgcgtaatttcctttttgcctatatgcatttaccctaaatctttctcctgtttttagagaagctgaaaaatcagcttctccatgttcttctattactttaaaaatagattcccccgctatgtcttttgccatttgcattgttacttctgatgtcaatatttgttcacttagttttacaaatccaccttttactctagctacaggatttgttccaactgttatgtgtatatctgatgcgtttagtcttataccttgctctaataaatcataaatatacataatatttactctccatatcttctattagtttacttatttttttagtagtaaataataaaattattttattatttatttatactaagttgcttcttatatttagtttacttttttgtatgaacttatatcatgattaatcaaaattttatcttttatatcataatttccaactacatttgtatctatatttagattaaagtttacaatggcgtcaaccttatactttgaatttgaattttcttcaacacctaaaccaataatattttttttaccatctgtaacttctacttcttttattccatctttatcaccagttaccattaagcttaactccgcccctgaaccattttcttttaatttaggccatccttcttttgtcatgtcgtagtcagccttataaaaaggtatttttatagtaataccttctgttttatcaatttcttgtggttttaattcttttaatctgcattttatctctgctaaaagctcattttgtatatagtcaaaagttgttatcaaagccatattatcatatttaacaggtattttctcataagacatactttttagttgattacattggtctgatatttcatacaataactctttatactttaaaaaattttttgctgtattttttttaccactagatatattatcgcttaacttctcaaattttcttacattatttctcaaatgaactcttaaagaattaaatccttgagtttgatttggtaaaatttccaataggttttctaatgtatcccatttactattccagatatactccatactatttattataggattttgtattagttcataatattgttgagaatctggaatcccattagatacttctacttttggctcatctatatgaaacgtatgtctatactcaatcatattttgcatcgccaaagaaatgttatctaatgccttataagtatgtgaaaaggctgaatttaaatgttcattttcaattttattttcttctaaaaacattttcaaaagaatatcattattcactaactttgcctcaatcaatgtagttgagtctatatcttctttcagaatatattcatttattttactaatatctccagaagtataattcttgcaaatttctaagatagaatctctatgtgaaataatatttgcatctacatattcaatgtctctatagtccaacatatctaaatcatatagctttttcaattccatactagctttttccaagtctgaagaagctttatttaaatagaaatttatattattcatatatccaagtctttctgcttcaatatttttctcatcttgattattaaaatcttcatctgatatatttcttaattttgacctagatatggatttttcttgattttcacttttaaactcattatccattttctcaagctcatcatacaatttttcatatgctttatcaatactattttccacacatgtctctgctaaatactttgcttgtataccttcattagtagtctttgtagattttattctattagctatctgatttgaaaatatcaatccaacaatagaaagcaatgctactacaatcaaaactaaaactaaagctgcccctctttcacttttaaatttattccacttcctcaaaatctcacccccaagtaaaattatttatctttaaatatttcagttacaattttaacctcttttttacttgaatagtcattcatgcttttcccagttacagctattttatatatctgaccacttttatcttctacaatagtctttatcttatttgtaatatttcctttgtcgattaaattaccatcttcatcttttattgttgtaatcttttcatatggagtatcatataagctcacgtcaccttcactaagaactttatcatatacaactttttttgatttatctattaatttttcatatacgacagttccatcttctagtttatctaaactatcaaaatcaaattctccactttttatcttttctcttagattttctatttcactttggacatagtttaaggaagttatatctgtgtcatttttagtgtttgctttgttattagtattgataatattaaaaaatgcaaatagtacaattcccataatagccatagctactaacacttcaattaaggaaaatcctctttcactattctttttactcatattttatcaacctacttattttttaataaattcttattaccctattcttgacataacatcaaatgtataagttttgttatttaaattgctatttttatgactttcttgcactgattcattatagtatatacttacagtataaatagatttaccagtttgcttttctattttaaatggtgtttccttcatttctttattgttttgaactagtggttgattatagattatctcttctctaacttcattttctgtatcaattgtattgttttggattctcgttacagaatatacctctgtattttttttagtttctatagaaacttcatattttacaacattatctggcatctctatattgtattcataattattacctgaaccagttttagttagctctttacagttttccaaatctctatttagatacttattaattagattaatatttacttgagcatctgtaataatctgttgcttttttactgctgatgttataccattgaacactttataagaaatacttaaaactattgtcagtataaaaacagctattattacttctaataaagtaagacctttttcattatttttgtacaaactcatcacctatctttaaagcttacttagctttatttagcactagacttaaatggattatattttcctggtctccatgaagatggattatctgtatcaagtatcattgtagtattctctttagtgtacattataaatttaaatgtagcatctactacaccttctgcctttggagctacgacttctttttttgcttctttttctgttgcagctctaagtacacaagtattacatagataattagtagacctatctaaaagtttgtcattttttagaatctctccttcttttatcaatggacaatccttatataaatgccacttattttcgccttccacccagtatatttttgtatctttatttatgttcacatttttaattaaatccttattgtttgttgtttcttcctcttctttttctggttctatatatgaagtcattgtataatctagtatttgagtaacatttttttgttcttctaaataagccattaattttttgacatttctataatcacctctaacacttattgttgttgatataccataaaaatgttcgtattctttaacatttccaacgtcataactagttaagtcaatattataagccttcatttttttatctaaacctattaaaaaaagaccatcttgcatatcatataaaagatttttgcttttttcttttaattcactttcaacttcttcaagttgtttttcatattttggcataagtgcagttttctctttatatatatttaatttttcagtagcctgttttacagaattttttgtagcaatatatttctgatattgagggtaaagtccaaaataaccatatgataaaatagctaataaaattataacctttataagaatcccttttagactaacttccattttaaatatatcttttatatcttttttaaatatatctttattcattagttaatacaccttctttcaggtataatgtcatactaaatgtatagttagaatcttctgcattactttttatgctatgtaatttaacatccttgaaatagtataatccctttaatttatataaaaattgacctacataagaggaatctttagcatttccttctatatttataacatttggtatcttatcatacaatggagttttatcatctttatccgtgttattactattagtctcactatttccagttaatgcttctgacacatttgtagtcttatcttcatttaaatcattatctgttttatctccattactatcacttttcgtacttgattttgtttcattgttacttgatttatctgttgtagtcttattactttttgaattatcagctttattattagttccaagattttgataagttgttgataaacttgttagttcaactttacttggagtatttttatctatatcatccaataaattttcccactttacctttttcccaattaacatatcatatacctttatttcttcgcttttactctgtatcattttttctatatttccaatctgataatatgcagattcaatatttcttatttcaccattaacattttcaagttccttatttgctaaattatttgaaaaaattaaacataaataaggtatagcaagaatcaaaataactattggagcaattttcagtatgtttttcatttgtttagcttttatctgttttctaagtatatccattggtaaaaagtttatattttcaaaatctcttttccctttaggttctatcatacttcctaaaagctctacaattgaatttatatcatcttcatctatatctccagttatcatatcagatatatccattatctcagtaaggccttgagaaacatagcttgaaaatgcagagctaaaagtttcataaattaatttattggaatatctttttcctaatattaatatagtatccgtaaccttaccaaagtttcttgacgaatagtaattcataagaccttttgattcttctactacatttaataattgcatgtccatatctttagcagttatctttataggtatattatcactaataaataaagtatctttcttatatatatttataattgtactattgtcacttatattggttaccattatatcattgtagtctaaatttttaagcattcttaagtaagctgttgataatgtatctattctatctaatactaaatcaaattcatgcattatctctacaattgcatttacctcttccttttgtatagctccaatgataagatttaagcttgattcatcgccatctgaattatcatgtgtttcactagatacttcatacgaaaatacatattcatctgactccaaagccatcatttcgtccatctctagcttcataaatccatctaaatcctttttgtccatattaggaagtttttggggttttaaaattacatctcttgtatttaaacaaaaaactacatgtcttgattttaacttaacattttctaatgcgtatctcaatagagcatacttttccttagaaaaatcttgtgcaatatcctctattgaaaacacattaaaattttttacataaaacttatccttatcgtgtttatatctgccctcaactatggaaatagaatcgccataatatgatacataaaccttattcatttgtcctttccctcctacatggcatcatatatactaagcattggcataaatattgatacaaccagtatcgcaactataataccaactgcaattattaaaacaggctctatcattgaggccatcctatttaaataaatctcggattcatactcataaaattctgccatctgtctacttatattctctaattcccctgtctgctcccctatagctatcatctgtaccaacacagagtcaaaatacgtatatctctctaaattttctgctaagccttctcctcttgttattccatctttagctgatgctaaaatcttctctgccatggtgttatttacactatctataatataatcaagcccttgaactaatgggtatcctgttgatacaaatagatacaatgctcttgaaaatcgtgtagctaccatacaatttattccttttcctaaaacaggtatcttgtttataactctatctttatgagcccttccaactgacgtttttaaatattttttaaactgatagataaataatataataactaaaagtactattatccaaaacttcttcataaacataccaaaccccataacaattcttgttataagtggaagagttgctcctactgttgtaattgaattaatcatcttaggcaccataaatgttgtaaatataaaaatcattataaatgaagaaatcaaaactattaatggatatgttgcagcatttctaagcttttgtttaaccctgtgttcacttgcataaaatgaagccatactttttaatacttcatctaatttacctgtagcttcacctgtagctaccatagcaccaagtaactttggaaactttgattttgatgaaagcattgaatctgcaatagtagaacctacttttatttctgccactatacgattaatttcttctcttaatgtaatgttagttgaccttctagctaatgtttctaatcctgaaatactatttataccagaagatactataatagcaaactgtctacaaaagtggcttatctggtcagctcccaagtctttttttctctttctactagataatcttatatttttatttttgctttctttgatttcaataactctaagatttctctttctaagaagatttctagcttcattaaaatcgttggcttcaatcacatcagtttgcttttttccgtcctcttttattactgtgtatttaaaacttttcataatatcatcctttaatcagtcatcaaaattattctaatcatttcttctactgttgtctttccatttaaaacctttttaactatatcctcttttaagctaaccatgccttgttttctagccatctttaaaatttctctttgatttgcagatgaatctattaactcttttatttctggagtaatttcaagcatttcaaatatacctagacgtcctttatatccagtattattacacctttcacaaccttttcctctataaatagttactgattcatttacatcaataccaagagcctttttttctccaatatctgcttcatatgaaaccttacaatgctcacatatttttcgtgtaagtctttgagatattacacctaaaacagatgaagttattaaaaaactttccacatccatatctaaaagacgtgaaattgctccaactgctgtatttgcatgtaatgtacttaaaactaaatgtcctgtaagagaagctctaattgctatttctgctgtctcagtatctcttatctctccaaccattattatatctgggtcttgacgcataaaagctctaagtccgctggcgaaagtaagccctgccttttcatttatttgagattgatttacaccaggtaattcatactctatagggtcttctattgttaatagatttctattttctgtatttagttgatttaacattgaatacaatgtagtggttttcccacttccagtaggaccaacaaccaatataagaccataaggagtgtttatcaattcatcatatatcttagagccatgttcgtctattcctagtacttctttactaaccataaaattactcttatcaagaaccctcatagctatcttttcatccctgttagttggcattgtagaaaccctaaaatctatgggtttattatctacttttaaatagattctaccatcctgtggtattctcttttcagatatatttatatctgacattatcttgatacggctgattactgccttatatggtgctgagttcatcctcatatattctcttaacattccatctatcctaaacctaacacgcatgtaattttcactttgttctatatgtatatcacttgcttccattctaacagcattttctagtatgttatttactaatcgtactattggagcagcatttacatcttcttcaagtattactgtttctcttactccaccagttctatttttgttgtactcagtcattgccttatttatttctgaatgtgcataagcatgacctattgctttgtttatatcttctgtacttgatataaatatctctacgtctttaccagacatacgccttacatcttgaactgcttctctgtcttgtgggtctgacatggctagacatattttatttccatcaattttaaatggaaatacagtatatcttttgcatatattttctggaaccatctttgtagctaaagtgtctatttctgtcccttctaaaaatatactttctatatccaagagttcttttaatacacttattagtaagttactatctataagcccttcttgtactagaaattctcctagtctttttccactgtttttttgttctgatagtgcccatttaagctggtcttctgttatatatcctttttcgaccagtttgtctcctattctaacttttttagccacaggtttcactcctttactatctcaattatatcatcattcataattgaacattaaagaaaatagtataaaaaaacaggaagattttcttcctgtcttttatattatatttttcattaaatttacaatatttttataaaaatatagttttaactattttgttgagtccatcacagtattatctataagtactatatatagaactttattatctacttttgtattacttgttaatggatttcccaaattatctgctgtaacacttgtatatattttattttcacctatatcactcaataattttgctgattgtgcttctgttaatgtaactccttcatcatttgtacctatctgtaataccaatttattaccaactttaatcaatttatattttccacctatatcagctttatcaggcagagactccatataagtctctaaaacacttaaaccagtttgaccatctggtgtaactggtatcttattagtatctgaataataagataatgctgcactcttaactgaactataatcagactcaacacttgctaccttagccttgtttatattactaaataaagctggaactgccactactgctaatatacctataattgcaattactaccaataattccactaaagtgaaaccttttttattcttttttaacttcatttttattcccccttaaattttttaattaatacttacttataatatatctggttaaaaatctaagtaaaattatttaaacgtactaaccaaatttatttctaacacataaccattttttaaataaaaaaagctatgaaaatgatagtatctataaataaatacaatttcatagccggttgcaccactaactcaatatgctctaaggtgcccacattacagaacataaatcaacgtttctattttattaaattcaaaattatataactcataatgtatatacatatccacttatattatataatatctaccatattttagcaacactgtttatactatttatatataccaactttttacatattgaaacagaatttctagaaaaattatactctacaaaaaaaagaaacatctccctacaattattatatatcgtaaggagatatttataaattatcatttagttttatcattgtcatttccatcctttgctaatatttatttgaaagctaaaagctattacaatatagtattttataaaatcatctattataaacattctatctattatagttatgattcagccacaatcattatataaacgaaactcttcatttacagctatgcttattgtgcaaaattactctttacagtaatcttatataatccagaaccctctcacaaacactaaagatagaatagatactattttcaattcttataaataaactttcaatagatttttatattcactttagattgtgactgaatcatttaattattaggggttcatcttctaaccttcccattggaaacacctctttctttatttatatttacataatactacataatctgaattttttcaatacttttttgtaatattttttatattcataatattttgaataatatgccctttattaagtttattttacttaaatatacataattttaaactataatctctttttacaataatatatacctttctaacaagaaaaaaataacattccataagtataaaatcaaaaaagagttgctcaaaaggtttatatccttttaaacaactctcataaatacaataaattagaataatttacttactgattcattagagaatatcattcttatagcatctccaaataaaggagctactgtttttatctttatcttatctattcttttctcttcaggaagttgtatagtatcaagaactattaactcacttatttctgaattagcaattctttcaatagctggacctgataacacaccatgagtacaacaagcataaacatcttttgctccaaactctttaagtgcatttgcagcattaactattgttcctgctgtatctatcatatcgtctaatagtataacatttttacctttaacatcacctattaagttcataacttcgcatacattagctttcggtcttcttttatctattatagctattggaacttctccatttaaagtattagcaaattttcttgatctagtaacacttcctaagtcaggagatactactaccaaatcttctattttcttttcattaaaataatttgctaatattgttccacctagtaagtggtctaatggtatatcaaaatatccttgtatttgagctgcatgtaaatccattgttaatactctgtctgctccagcagcagttattaaatttgcaactaatttagcagtgattggatctcttgccttagcctttctgtcttgtcttgcatatccatagtaaggaatgactgctgttattctacctgctgatgctctctttaacgcatcaattaagattaataactccattaagttatcatttactgggctgttagtagattgcactacaaacacatcacaacctcttactgtctcattcatgtttacacatatttcaccatcactaaatgtacctacttcacaatctagtactgatacacctatatagtcagctattttttgtgctaactctttcgatgaattacctgcaataattttaatctcgcttccgctagtattcatttatgtaaccctcctgaaaattttaaaatactaatgaatataatttataataatttcgagctaaattttttagccaaaataataaactacataattacttactttggtcgtctttttgattctttttttctacccatccttctttgataacttgtctttctcttgctattgccaaagcaccatctgggacatcatgtgttattgttgaacctgttgctatatatcctttttcttctacaactactggtgcaactaaattagaatttgaacctataaacgcattgtcttttactactgatttaaatttatttttaccatcatagtttacaaatactactccacatccaatatttacatttttaccgacatgtgcatctcctatataagaaaggtgagatgcttttgatccatcttctataatagcattttttacttctacaaaatcgcctatttttacattatttcctaagtcactctttggtcttaagtatgcatatggcccaacattagaattttctccaaccttactatcaattatagttgaattttttatttctgtaccatcacctatttctgaatttgttatagatgagttcattccaattatacaatctgaacctatccttgttttcccttgtaacataacacctggatatattatagtatcattgcctatcataacatcagattctatataggtagagttagtgtctattatagttactccatttaccatatgagattcatttattcttcgtctcataatttcttctgcctttgataattctactcttgaattaacgcccataagttcttcaatagttgaacctgcaaatgcaccaacttttaatcctttatctctcattattttagcagtatcagttaaataatattcaccttgtgaattgttattatttagcaaatctagtgcttctctaagactctttccattaaaacaataaattccagagtttatctcacttatcatcttttcttctgaatttgcatctttttgttccactattttaagaaggtcacccttcttatctcttattattctaccataacctgttggatttccaactcttgttgtaagaactgtagcatgatatttattttctatatgatattcaaataatctcttcagtgtctcttcttttataagtggagtatctccacaaagtacaactattgtatcttcatcattaatatattctttagccatctttacagcatgtcctgtcccaagttgttctgtttgcatggctattataatttcttctgcaagcttttctttaactacctcagcttcatgtcctaaaatcacgacagtatcttttacccctgatttttttgaaacatctataatatggttaaccatttcttttccacatactttatgtataacttttgggtatttagacttcattcttgttcctttgccagcagcaaggattatagctttaaagttcattgatacactccattcaatctaatttaattttattcgtattattctcttaatcaatatacattataatacatttatctaacaatttgtatacaacatatacattatcactaataatatagcacttttttactaaaaagtacatattttaatagaaattctacatttaaaaagagcctaaatgttcgggctctctccattttatatatttattattcagcagctacttcccattgaactaatgcttcatgatatgcttgtaaaactgcatcttctaaaacttgtctcatttctgcatttattggatgagctatatctctgaaatttccttcgcctacttttctgctaggcattgctataaatagcccattatggccttctataacttttatatcatgcactacaaacaaattatcgaaagttattgaaactatacatttcatcttaccttcttctgttaattttcttactcttacgtcagttatcttcataccaaaatatccccctttgattttgacagaaattaatttatattaaaattattatcgctggaataaattaatataaactgttttttaaataattctatgaacaactagggatatcctctttttatttttacatatttttctaaatattttttttattaatcttcatctatctcaaattcaaattctgaatcttcttcttcgtctaaatcttcatttctatattcatctttaaaagtctttaagtttggttctactactattttatctccattaacatccaattgaatcaatgaaatataatcttttaccattttttctgaaggattcgttgtagatatgaatactccagtacctataacctctgcaccaaattcattcataaggtctaccattccttttatagtacctccacccctcatgaaatcatctataattataactttactatctggtttaagagcttttcttggcaaactcatactttcaactttagagctgtttccactcacatatgtcatgctaagtgtaggaccttctgatacctttatatcttttcttattataactagaggtaaattcatagcttttgcagtcataagtgccataggtataccttttgtttccattgtcacaacataatctgcatctacatactcaatatttgatgcgaatatctttcctatcttagcagctattgtagggtcataaattaggtcaatcaagtataaaaaaccaccagatagtattctagacttgtcacatattctctcacataattccattaagaactctgcattttctgctatagaagttttaggtatatattttactcctcctgctgctcctgagatagttataactttacctaaatgtagcttctcaaatacattttttacaactaataaatcttcacttattgttgattttgctgcattaaattgatttgtaaaataacttaatgtatatattttatttggattatcagacagtattttaactattgctccaattctctctgttcttttaaatttcattattatttcctcctacaagtacctttatataacgttaaactaactaatgcataacaattcttattgtggtataatattacttatgttttattatattcaaaaataaaatacatataatattatatgcatattaattataaaatattgaacattatattattataccacataaatagttcatattgtaggacttaattaaaaagaaaggtggttttattatgaatatacactttataggaattggcggtatcagcatgagtgcattagctgaaatatgtatcaataaaggttatcaagtttcaggttcggattcaaacgaatcatacctattagacaaacttagggaccaaggggcaactatttatattggtcagaaaaaagataatatatcagatgatgtaaatatggttgtttatacagcagcagttcatccagacaatgaagaacttgtggctgctaaagaaaaaaataaattggtaatgaacagagcgacttttttaggccaaatcatgagggaatataaaaattctatagcagtttctggaacacatggaaaaacttctacaacatctatgttatctacaatctttgaatatgcagacttagacccaactatactagttggtggtaacttaagtatgataggtggtaatgttaagataggtaattccaaccactttataactgaagcatgtgaatatgtagatagtttccttaattttaacccaaagatatctatagttttaaatgttgaagaagaccatcttgattatttctctggaatagatgaaatcaaggcttcttttaacaaatttggaaaattattacccccagaaggctatttcataataaatggcgatgatgaaaatattgatgacatattgtatgatgttaaagctactattataaaatacggtagagattctgacaatgatgctgtaataaaagatattcactttgacaatagtggtcatggaatatttagaatagaatatgaaggaagagatttaggagaatttgaactttctgtatatggtcttcataacatatacaatgcttcttctgctataatggcagctcttgtttctggtattgacttagagactataagaaaaaatataaaaatttataaaggtgtcggaagaagatttgaaactaaagggtattataagaatgctttagtagtagatgattatgcacatcatccaactgagttaaaagcaactttagctgctgccaaaaaattaaaaaaatcaactttatggtgtatcttccagccacatacttatactagaacaaaatctcttttaggtgaattttcagaggcattctatgctgctgataaagttatcataacagatatatatgctgctagggaaaaagaccctggagatatacattctaaggacttggttgagaaattatatcaaaacaatgtagatgccatctatataaaagaatttgaagatatagtaaaatacttacgtgaaaatgttaaggataatgatttagtaataactgctggtgctggtccaatttataaggttgcagacttgttggttgaaaaataatatataaaaataatttaggctatcaaatatctaatttgatagccttcttaaagtcttatttctttccaatttcaaatatctcatttttaaggtaatcaaataaacttgtatgaacctcatagtaagatacatttttcttagaagtaacttttacataatcttttcccattgtatcaacttttacatcaaaattatcaccttttatatttatagtaaaattatagtcacttctttccttacttttctcaggttgaacttttcctacaaccctctttgaaatcatcttatgtgctaaatcatcaaatttccatctatgaacttttttaatttcttttccatgagttatagtaacctctttccaatctttataatgacttaaaaggtcaaatgaagtatatatactctcatctaaaagtttcttaaaagcatccttagaactaactggtactttataatattcttctttatttacagtatatactctaaaaaagttaaggtcagtagaaaatttaactccatcatcagaataaccttcataaactgcttcgtaagaagaagtagtatttcttactttcttaaaatctgagaaaaataactttatttcatcccacatatcttcttcaatttttatgttttctatatttttgtctgatatataaacctttttcttttcttttatttgagtccttaaagacctattatcttcttcttctttttctaccttctttggcacttcacttttatccttttccatatttattcctattctaaaggatataaagtatattataaagaaaacaactactcctattaatattgcagcttttttctttagttttcttttcttgctcatttaaccacccctagagtttataatcataaaacaattatataactttttacacttttttttaagttttaattaattattacacttatttccttggcaattagtacatggttcaacgtgaactgttatgccttttacaaattccatatgttttattatatgtttttcaagcttggtagcaatatcatgaccttgcttaactgtcaaattttcatccacacatatagtcaaatctacatatgccatagctccatgttttctagtctttatatcaccaagatttttaacaccttctgtatctgctacaataaattttaattcttttatctcttcttcgtcaactgaaacatccatcaattcattaacagaacttataagtatactaattcctactttagctacaaatatagccactacaattgacgcaattgggtctagtggcttaaaccctaaaatagaaccacctatacctataaaagcagctactgaagataaagcatctgacctatgatgccaagcatcagcttttaaggctggtgaatttatctttttagcaacttttattgttattctatattgatactcttttatcaggattgaaataactgatactactaatggtaatattgatggaacacttaatgcatctaagttaaataaagatttaattgcctctatacctattgttatagaaacgaaaataagcaatattgataacacaaatgatactaatgtctctgctttctcatgaccataattgtgctctctatctccaggtctagaagatacataattgcctattagtactcctatagaacttataatatctgatgctgaatgtaatccatctgcaatcatagcgctagaattaccaataacaccagctataaccttaattattgttaatactacattccaaagtattgattgtattgttattttatttgcttcttcataccttgtttccatatttattcctcccttatgaaacaatctaaatattattaagaacctacatctgaacataaattaaacactctcttatatgcaaatgtatactctttgctttcaatagagattatcaatcttctataaaatgaaaaatcacctagcttaagctaggcgatatatatattatacactattatttaaatttatgcttcctttattatctccactaccattttagcagagtcatataagtcttttatagctatatgttcacttagtgtatgagcatttttcataccaattcctaaagttatagcttcgataccattcttacttaatatatttgtatcgctacctcctcctgtagattcagtatgaccttctatacctaagtttgaaaaagccttctttgcaagttttattatttcagaatcctcactaacatctattggtgtatatgctctattgacatctatctcaatttgagctccaaaatcttttgcagctttttcaaaagtctctaccatgtgtttagtttgaacatctaatttattttcttttagacttctggcttctgcaactatattaacttctcctgttactatatttgtagctgttccaccgtttataattcctatgttagcagttgtttcttcgtctattctaagtaaattcatattttctattgctctggcagctaccattatagcacttattccagcttcaggttcaagacctgcatgagcagtctttcctaatatcttaacatttattacatcttgtgcaggagcttttactattatttcacctggagaaccaccactatctaatataaatgcatattcagaatctatttttccatagtctaaatttttagctccaactaatccacattcctcacatatagagaatacaacttgtatatcagtatgttctatgttattttcatttatatatcttaagccttctaatatagctgctatacctgctttatcatcagaacctaatattgtagtaccatcactttttattattccatttgcttcatccactataggttttacccctatacctggagttactgtatccatatgtgaactaaataatattttctttccttctttatttccttttaatgtagctattatattaccagtttctccatttgctttttcaccagcattgtctattactactgaacaacctatttcttctaattttttaactaatactttagcaacattcccctcttttaaagataaactatctatctgtactaattcaagaaactcatttaaaattctttgctcgtttatcataattttcctccataatataataggtatttcaagatatattgtagtgtaatatttaaatattatcaatagtttttaaagttttgtactacatttcattaattttttcagtaaaataagaattgagtctaaattttttcatttttattatttttacctaactatatttctttgtctagaatctataaaacatagccaatatcctaaactatttgttctattatcacaagcttgatatcttaaaaatcctgtgcttccattgtctggctgttcatttctatttcctgggatagcataaatataatgttttctcttattatattcatcatactgaacaccaaataaatagtgtctgtatttatatgaatgtaaaactgcatcactatacatagtgtaattcaatacgtttaaatatcctaaataaggcattgtatatccacacagtgttgtaggatttatctctattttccaccatcttgtcttatctatataatctgttacaaaaggttttacttctttaaataatttcaaacctttttttatttgtcttggcataagtaatgtactggtttgtttatttccactctctccttgacttactccattagctctttttattttttcaatattattctgatctttttgaactttctttgatttagtaggttttgaggaaacaaacctatcttcttctctatttacttcaaaaacttcttcttcttcctcttcttcctcatcatattctatgtctatatattcttcctgtactttaaccctattataattttctatttccttataattattgaactcttctatttcctcatcaccagaatcttctacttccgttcttgcttttaactctccttcttcaatatcttcatcatcttcccaatagtcttcatactcatcttcatcatattcttctataatatattcttcttcactatcttcgtctctatcactttcctcattatcctctatctcttcgtcttcttccaactcttcatattcttcatattcttcatattcttcttcctctacctcttgaaataatatgtcctcataattttcaagcttatttcccttaaatccaattaaaggtatatttctttcatacaataatgcaataccttttatctcatcatcagaatcttctaaatctaaaacaaattcacctcttccttgttcatttaaaattatatttcctaagtctattaatccatggtcatcttttattgctactgctttatacccatctttaacatattttagattttctacatataatgcaataattgctttttcatcatttacttcaacttttgcaaaagcttttggcagtactcgttctttgtatctaaagtttatgtctttagcttctagtattatatagtctcttttaaactttcttttagaacccactgcaatccccccttaacacagtttctctaaacaatatatgttaacaaaattaaaaaaagtaccttctatttagaagatacttttgtatttattatatttgaaagaactgaaaactcttctatactaagagtttcaccccttcttttttcgtctatattagcttcttttaatatttctcttatttcatctttattaagaaaaccaagacctcccaacgaattaagaagagtttttcttctttgtccaaaggatgcttttactgttttaaaaaatatgtcttcattatgaacatcatattttcttttatctcttacatgtaaacctataactgtggaatctacatttggttgtggtataaacatatgtcttggagcttttgccacaatctctgtatcacaatagtattgaacagctatagataatgccccataatctttagtacccggaatagcattcattctatctgcaacttctttttgaaccatgactactatgtctgttacaggtatgtcttcctctaaaaatttcataactattggagtagttatataatatggaagatttgctacaagcttaactggtccaccatttaatttatcttttactaattcctgtatgtctacttttagtatatcttgatttacaacctctgtattatctaaatctgacaaggtatctttcaatataggaattaaatttctatcgatttctatagccactactttttctgctattttacccatctcacgagtaagagttcctataccaggtcctacttctatgatattatctcctcttgtgattctagctccagataagattttatcaattatattactatctatcaagaaattttgacctaaagactttgaaaatttaaaattatatttttgtactacttcctttgttgcattatgtgaagatagtctatccattatttactcctttttaacttattttgatatttaattttattaattatacttatttatatgtatttacattgatttaaaataaggtatatattataaataatttatcttaaattaaccgtaattccacaatttattttatatacatatttttcatacattaaacattacgtttagatttgttttaatgcatctataaattcttctctttcaactccataattattcaatctatttaaaaattgttttgcatttccatatccaattccaagtatttttccaagtgcatctcttctaagtgatgcttcttcattacctataagaccatttctaattaagtcaacttgcttaaattcatctcttttttctgtattttcagttctaactttattcagagctgctattatactttgaggagtagcattctcaatacctatatctccatcctttttagcttcctctcttggtagaaatgcatgtttacatcctggaacttctgatgctattttttttcttattttttcacctgcaaaatctgggtctgtaaatattataacaccacgtctttcattagcagcttttatacgctgcattacaccttttggaaatccaaatccacctgtagttataagttctgcatctattgctctcttaactgctgtaacgtcatctctaccctctactactattatttcttttatcatataaattcaccttttattcgtttttagtttttctttacatctctttattttaaggtttttatttaatttaatcaaggtactaaactatttatttttatatagaaatatgcattttaaataaatatatcaaaagagcctagatgtaaaacttatattctaggcgctttttgtactaaattttattgtaaggcttagctctctttttctgtctttccatcatatttttctatccatttatttagtatagcctctctatttcttgctgctgattttaaatcattatctatcatctgttctaatggattctttggaaatccttctggcaccggatttcccgtgtcaattgtagtaactgcaaaattcttagaatactcattcattgcatctttacttatagcccaatctaaaaatacttttgatgcttcttttatattatcttttttcacaagtgcatttgattctatctcccatccagaaccttcttttggaaatactacttctactggataaccttcaccttttaactttatacctctatttccaaaagatataccaatgggatattctcctgaagctgctaatatagctggcgctgaaccagactgagtgtatacaccaatatttttatgcaatttatccatatactgccatgctttttcttcacccataatttgtatgagttctgatactgttaaatatcctgttcctgaagaagctggactaggcatagatataagatctttatattctggctttattaaatcttcataagaattaggagctgatatgtttttagcttttaattctttagtatttactgttataccagtcatccaagcatctattccaacccaagaaggaactttcttatcatctttaaatgcaggatttaccttatcaaagcctttcggagcgtatggctctagcatttctttgtcatctaaaattatcaaacttgtagctgcaacaccccataacacatctgctttaggattatctttttctgctaataatcttgctgttatacctcctactgataatctaagtacattcaatttaatatctggatatttctctttaaatgtagctaagtatgtatctatactatcttcctcaattgctgtataaactgttaactctccttttgtcttattattagactttaagtttgaacctgatgaaacattactacatccagttattacactcaataaaagtgttgataatattcccaaagagactaacttcttaaatttcatttttacctcccttattcaacttctttttgttgccatttttatgtcttggtttttaatttttttattatcaattcatacaaaagttttactattatatttgttaaaagcactaatacttccataacagctgatggtcctatatacaacactatatcatctagctttagtttttatatcgatacggtctgagtttgaggtctataatttctttgaaatctctattaaattctacccttatatcttctggtctaattgctatcatgtttatatcatcatccataaaatctattgctcctataaaatcagctactcctagagctaacctgaacttaaataattcttctctagttaaatattcttacttccaattttaagttatccagaaacaatttaccttttatttttctctttttttataatatataacaaactgctcaaattaaaatatatatatatatctttttaataatcgctcaatattttatttactttagtttataattatttaatatcttatttactttatatataacatctatactttaataatgaaattaaaatatactattttaaactgtagtatatctatttctaaattaatctctaaaaataaaaaatataccattcaaactgaatggtatacttactctatacatttttatagaatattcacttttcttgacctatattattctcaacttatattattataataaaatctacttaaaaaaattttttctttttactccatttgtatagttttacttaactctctttttctgtcttaccatcatattttgatatccatttatttagtatatcttctctattttttgctgctgattttaaatcattatctatcatttgctctaatggctttttagggaatccttctggtattggatttcctgtagaaatagtagtaactgcatagttcttagagtattcattcattgcatctttacttatagcccaatctaaaaatacttttgatgcttcttttatattatcttttttcacaagagcatttgcttctatatcccatccagaaccttcttttggaaatactacttctactggatagccttcctcttttaattttatacctctatatccaaaagatataccaataggatattctcctgaagctgctgatgtagctggagctgaaccagattgagtgtatacaccaatattctcatgcaacttatccatatactgccatgctttttcttcccccataatttgtataagggctgatactgttaagtaccctgtaccagaagaagatggattaggcatagatataagacctttatattctggctttattaaatcttcgtaagaactaggaactgggatgttcttatcacttaattctttagtgtttactgttatacctgtcatccaagcatctatcccaacccaagaaggaacttctttatcatctttaaatgcagactctatttcttcagaaccttttggagcatatggttctaacatcccctggtcatctgcaaccaataagcttgtggctgcaactccccatacaacatctgcttgaggattatccttttctgctaataatcttgctgttatatctcctgttgatgccctaacaatatttaatttaatatctggatatttctctttaaatgtagctaaatatggctctatactatcttcttcaattgctgtgtaaactgttaaatccccttttgtcttactatcagactttgaatctgaacctgatgaatcagtactacatcctgttattacacttaataaaagtgttgataatactcctaaagaaactagctttttaaatttcattttttcctcccctatgcaacatctttttgctgccatttttgtgtgttattttttaatttctttgttacaaattcgtacaaaagtcttactattatatttgttaatagcactaatactgccatagcagctgatggtcctatatatcctatctcatctaactttagtattgatattgatgcagtctgagtttgaggtatatataaaaatattaatgctgaaacagtaaccattgaatttacaaaataatatactactatttcaagtattgatgttatagacatcggaactgttatattaaaaaatactttatagaatggaatatttatagattttgcaactaattcatactctttatccaacatttttaaagatgaatttgaggttataaaacaaactgaataaaaatgaactacatttactataactaatattgctgtacttccatataaaaaatttaatggattacttgctgagttaaaaaaagttatatatgatatacctaaaactaagccaggtaaggccattggtatcattgataaaaggtaagctgtttgtcttaatttaggaaacttatccaccttttctattatataagcactaaaaaatacaaatatagttccaaatattgctgttaaagttgatattttcaaactgcttaagtatgtttttattccacttcccaaaatacctttaaatgtatagtgttccattgtaaagcttaaattatatggccataactttataactgaacctataactgaaacgaatattaaaataaaaattagcaatgttataaaactacatactattaaaaatactctatctctaaacttattttccttaatcttatatggcatagactttgcagttatggtcataccttgtttcttacttgccatcttatctaatgtaaatgctattagtacaggaattaacattaccatagaaacagtagctcccattggtatgttaaattgtccaactacttgtttatatatgtcagtagccagtacattgtagtttcctccgactaccttagctgctccaaaatctgtaaatgcaagtataaaggatacaaagaatgaactaagtaatgagtactttataccaggaattgttattttgcaaaatttcttaaattcactagcacccaagctatctgctgcttcataaagtctataatcagccatcgaaagtgctacagataatattaaaaaagcttgtggaaatgtaaatagaatctgagaaataattattcctaatggaccatatagtggtacttccagacccatggttgtaaagattcccttatttccaaaaaggtatataagtgaaataccatataacatagttggtgcaaaaagtggaaacattcccatagttttaaaaaaatctttaaactttatatttgttcttgttattgcgtatgaatatataaatgctaaacatagtgatattaaagatgagactgtagatacaaaaattgaatttttaaatgatgctataagacttggattttcaacatatttactaaagtttgaaattcctataaaatttccacttgtatccataaatgcattttttaataatgatactaatggaaataatataaatactattagtacaattaccgaaaaaatcaagaaatatttttgtattgtgctatcacttattcttcttttattttttgatgttatcatttattcacccctagctattaagcacatccctctgatttatattgtacaattccttctttaggtatcttaaagtttattttagaacctatgcacagtttcatttgttctgcaactttggaaactacatctaatttcatttgcttagaacgatactcaactgtaattctatagttaaatcctctaaattcgatatctaaaatttctcccacttttatatccttatctttagaatctctattagactctacttttatatcttctggtctaatagctatcttattaataccatcatctataaaatttattgttcctataaaatcagctacaaaaggtgtttctggatttttatatacctcctttggcgttccaacttgtattatttctcctctattcataacaaccatcttatcagctaaacaaagagcttcttcttggtcatgcgttaccattatagttgtaatgcctagttttctatgtaaacttctaatctgctccctaagtttaagtcttacttttgcatctaatgcagataaaggttcatcaagaagtaaaaagtctggctctaaagcaatcgcacgagctaatgcaaccctttgttgttgtccacctgataattgtgatggatattttttctcatatccacttaattctacaacgtctagaacttctttaacttttttatcaatattagatttacttatgtttttattttctagtccaaaggctatgtttttgtaaacattcatatttggaaataatgcatatgattgaaaaactataccaaaatttctactttcaggtggtgaattagtcatatccttatcatttattattatttttccaccatgtttatcctcaagccctgcaattattctaagcagtgtactttttccacaaccacttggacctagtaaacaaataaactctcctttttcaatatcaatagatatgtcttttaacaccttaacttgtccataacttttacctacattttttacttgtaaaaaagacatttataatacccctcctaaagctaacctaaacttaaataaatcttctttatttaagctcttgcttccaagttcataattatgttgagaataaaatccgtggtaatctgagcctcctgtgaccactagattatacttcttagcataagaaagcgactctttttctagttctttgttgtgagatggatgatatacttctattccatctaatcctacttttaccatctcttcaatagcgctaaaattatccatttgacccgggtgagctaacacacaaattccaccagaattttttatagcttttattgcatctctgtaatccacatattttaaagatacatataccttgccgtttcctctatgaaacaattctttatatagacttgaatatatattatctgtatatcctttatctataagagctttcattatatgttgtttaaatattccagtctttgatgaatatttctttacatcttccaaagatattttgtatcctaaatctataattttatttaccatcttaacagatgctttatgtctgtcacataccattggattgcacaaattttttatttcttgactgtttaaatctatgttatatccaagaatatgaactctttttctatttttataatcataggctgaaatttctatacctggtattattgttattccataatgctctccaagcacaagagcttcatccaatccagataatgtgtcatgatttgttattgctaagatatttatattcttttctgctgctttttttattatttcttcagtagtaaaattattatctgatatacttgtatgacaatgtaactctgttagcaatttttatacctcccttttataaactgtttttccatttacaatagtatttaaaacctttggatattcactatcaatatctactaaaactaaatctgcttttttattttcttttatactacctctttcatcatatataccaactgctttagcaggatttgaggtaaataaactgactgctttatttaaattatttattctttctgcaactatacacatagactttatcatagctgatggaagataatccgaacacacaatgtcacaacaatcttccaatatagcatccattgcttttaaattgttattatgagatttacctcttacaatattcggtgcacctaaacaagttagaacacccaatttttttgaatgttttgcaacttcaagagttataggaaattcagatacatttatgcctatattttttatgaaatccattttttctaatgtatcatcatcatgtgatgcaacatttatatttttagttttggctatacctataatattagctattttattccaatctaaattatcatgcagatttactaaatcatctaaccatgtatctacataattttctgtaactccccacactttagtagcatactctttataaaatgttggatttgtatactgaccttgtcctggagaatggtccattattgataagtagtctattttattttcatctaatagttctaaaaccttttctaaaccttcataatacaacacttcatatcttaaatgaactttatgatttatactcttactatctatatttttatatgaatcaatatttttaatcatctttaaagagttatcaatacttctaactcctactccatcccctaaagatatagaatgataaactgtagttattccatttgcaggtagttttttatctagttcataaaatgccatattaaatggtaataatgtacttggtcttggctctatttccttttcaatggcatcactgtgaatatctataataccaggtattacatataagttttttgcatctattatttcatctatctcattaaagtcaaatgcgtaatcaatcctatcatttgatactttttttattgtatctccctctatgattaaatgaccattttctaaaatcatatcttctaatacaatatttgcattatgaattagttttatcatctaggctaccccactttcacttatagtcccttttgccatagtaaaggtcttatctataacagtttccataaactctatatcatgaaaaattcctatcattgtagttccttgacttttaagttccaacattttttcttttacatatattttagattgattatcaagtgatgcagttggttcatcaagtaacaaaagtctaggctttttaaccatagcttgagctaaatttaatcttaatttttctccaccagaaaaattatttggatacgcatcccataaattttcctttatttcaaattggttaagtatatcttttgccatatcatacgaacaatctttttcaaacccactctcaattaaagaatgtactaccagttcaattgcagttattcgtggaagtgtctttaaaaactgtgatacatatcctatttctttctttctaagatttatcatttctcggtctccaattttagccaggtctacattaccatatatttctgaattaaaaattatttctccagttgttggtatatatgttttatagatactttttaatatggtagacttacctgctccagatttacctattattcctaaaaactcaccttttgaaacttcaaaacttatattactacatgccgttatagtcttgttcaatgcatgtaactcaaagtctttactaaaattatttacttcaagtatagtttctttcattttattaaaaacccccattttgcttatttacaaacgatatttatagcaatgaatttataagttgctgagtatatgggtgttgtgggtcctccattatttggtctgtaagaccagactcaatcacacttccatttttcattacaattgtcctatcagcaagcatctttataacatcaaagtcatgggatacaactatcatagaaatcttaagttctctttggatttctcttattaaatccaatacttccgcttgcacagaaacatctaaacctgttgtaacctcatctaatagcaatattggagggttatttgaaagagcttttgctatttgaactcgttgttgcattcccccactaaagtattttggtttatgatctattctttctacaggtatattagtttttattaaaagttctttgcctctatctcttattttttcaacattatataaatttgccatcaataatttttctgctatattaccaccactactaaagtctaaatttaaaccaaggtggggattttgatacacaatacccataaaatgattctttatgtatctctttttttggtctgaaagctctagtatatttgtgtctttattgtaatgggatatatatacttctccactatttgcatgttcttggaaaaacagtatttttaataaagtgctttttcctgaaccagattcacctacaattccaaggacttctccttcataaagttctaaatttacattattacatgcaactatagaaccacaatacttacatatattattgctttcatatcctgtgctttcaaaacacttttcacacccatctccataaataagattgatatttcttcctattaatacttgcttgtctatattttctaatcttttagagacatttattttactcattccaagtacctcctattgtcacatctatactgttattttttaatctaactttttcacaataacttgtatctgagcaactatagtacttttcattagtgtcactgtcatatacttcatctaaaaatgtatttgtactgttacataaactacagtattttccttcaaacttttcctcttcaaacttataatcctcaaactctaaaggttctacctttgtatatggaggaatagcataaattcttttttctctacctgcaccaaacaagaataaattgtctgacatatttaatttttttatatcaaatctaggtataggtgatggattcattaaatatctatcatttactttacatggatattcaactgctatagatatatcattaaatctaactatatcttcataaagatatacccacatcctactataatcttcttctgaatgcattcttcttgtttctacttcactaggttctactattctaagggtttctggtattggtacttgaaatattagtatttgattagatttaagtttttcttctggtattctatgtctcgtttgaatcaatgtagcttctaatgtatcttttgtggtttctacattacttacacttgcaataaagctccttatattacaagcatttgtagaatcatcacttccttggtcaattacttttactacatcatttttaccaattaatgatagtgttaattgtaaacctccagtaccccatcccttagctataggcaactctcttgaaccaaagggaacttgataaccaggtattgatattgcttttaatatctttcttcttatttctttttttgtgttttcgtctaaaaaaccatagttatatatcacctaaacttacctccacaaactattttattctttctacatccgctttaaaatctacatagtgaggaagcttaaagtgagatataaatcctaatgaatctattccatctatatgaagcaatacaaattcttcatcttgtgctagtttttcactatttggctccaaagatttgtctagtatggccatagatatagccttattctcattattccccatacaaagaccatatcctaaagacatcttatttttatcttccgaattagttttagaattttcagtcttattttgtgatgcttttgaaactatttcacattcagtaaccagcatatcacctattattatttcttcatcttcatagatgggatgttttacttttataaatacattaccagttctaagttcacttatatatggatgttcatcaccaaaacctcttacaatagcataagcaaaacctgacactactccactttcacctctagtcaatgcctgtaactttgctgacctagaaactggaaatcttaaactatttcttgtaatatcatcaataacttcttccaatttgttttcacaaacttcttcttgtaataaattttcttttctaaatatattagatatttttgtaaattcagggatttcatctactgtttctaattcatttataaaactatctctaaaatctctattctttttttcatcttcttctaataattctacatttaatattctattttcatagtctctagttgccccaagatactgacctcctggtatatctttaaaagtagctgatattcttctttttattctcatttcttctgtatttatgggttctgaatatgtaattctaggcattgttgaccttaaagctcttacatagaaagaggcttctaatatatcaccttgagcttgttttatagccaatgctgatagttccttgttgtataaacttccttcagacattactttgtctacagcataagacatttgttcctcaatctgctttacatctataggcaagctatctccttttaccctataaaactcaagtatatttttagcctgtaatatggcttcttctccacctttaactgctacataagccatttctacaatacctcccaacttaattttgatgaccttggtataaatgcaatttctccttttttatctactaaaatcaaatctattcctattggataatctttatttatggtagataatctttctataaattcttctctaattccatttatatatatactatttttagattttataccaggaccactcaaatcaagctttatatacttagtttgagagtacgttgataaatcatttacttgatgtactatagttgcactttcatcaggatattcaaaagaacctattttaatctgtaatatatccacttctgaattaatatctaaaaatatataatctgattttctataatctatttgatttgacactgtaagcgctcttatattttttatatctttttgagtataattttctatatagaaggtaacttcttggtctaataaagtgattgctataccaattgctccattcaatagttttgtattattttctatatttatattatctatattatttaatttcccaggaaacgaagcactatctagcatctttctatatatttcttgtgtataatttaccatgattctcctcctatttaatccatagcattgaattgaactttcgttttattaatcaagctaaattcatcaataatctcttgttcataccttaagttctcttcatatacacttttatttatgtaattctttaactcatcaaatttactgttattgctatgtaaaactgcatctataactgctaagtaaatggctttcttattattgttttctgaaactattccgtaacccaagctttcatctacctttacactacattcagtaactaatatctctcctaaattaaatgttgtattttttacactttcattagctcttaccattactgtagccaagttaggttctttaattatagaaatacttgatgtatcttttatcattgagtatatcttttctagtttctctaagttcatatttatcaatatcttagtactatcaactgtatacaaaatttagcctccttaatctacctttcgtttacttctctttaataatataataaaccacttaagttaagtgaatattagagttgagttaattctaatgaatatcttgtaaattcttttttaacaatgttaagaaaatatattttaaaatatgaattaaacaaataaaaacaaactgtctcaaaatatgataaacttctttttcattgttgaaatgatgaaaatatatttgatttcataaaaaaagagtgcctcatgaactaaaaaactcattttgaggcactctcatcctatacttataatgacttattatatatatcattataagatttaatttgtctattttatattaaaaaatttctttgcattttcttttgtaactctacatacttcttcataacatatccctttttcctgggctatcttatcagcaacaaaagatacttgagaaggattgtttctctttcctctatgtggctctggtgacatatatggtgaatcagtctctatgaataatctttctagaggtatttctcttactacttctctagtttttttattattcttaaaagtaaccgtgcctggaattgatatataacaacccatcttaacatattctctagctaactctacatttccactataacaatgaagtacacatcctatttcaggatttttagtattctttattatctcaaaagtatctccatgtgcatctctatcatgtattattattggaagttttagctcattagctaattcaatttgcttcttaaaccactctttttgttcttctcttggagaataatcataataataatctaatccaatctctccaatagctacaactttttcattctcagttgcaagttttcttagagtttctattgctgtatcatctagttttgatacatcatgtggatgtaccccaactgctgaatatataaagtcgtattttttcgcaagttcaattgctgttatcgacgtctctatatctgctcctggatttacaaccaaatctacacctttatcttttaatgaaccaataagttcatctctatcttcatcaaaactttcatcatttaaatgtgcatgtgagtcaaataacatctttaatctccttactatttaattacctactaacgaacctcgcatccatctttagccccttgtgtaaatggtaaaacatatgggtctccatcatcacctgctgctaatatcataccttgagattctacacctcttaatttaactggttttaagttacataccactgtaacctcttttcctactaaatcctctggcttatagtattcagctattcctgatactatttgtcttgtttctggtccaatcttaacttgtgatactaataatttatttgcttttggatgtttttcacagcttattattttccctactctaagctctattttgtctaaatcatcaatagtaatttcttctttatgctctaaaggtttttcttctactggaggtttcccagagaacattttagttaattcttctatctctttttctacatctaatcttgggaataaaggttcacctttaaatacttttacattttctccaataagaccaaatgtttttgtactttcccatgtagttatatcatcttgaccttttattcctatatgttcatatattttattagcagtctcattcattataggatttattagtgttgcgattattcttatagattcacataaattatataaaactgtgtctaattcatctttcttcgtttcatctttagctagtgcccaaggcatagtttcatctatatatttgttagttcttctaactaatttccatacactctctaatgcttcatggaattgcattttatccatttcagcttcaaagttttctctagttgaaacagcttgttcttttaagtcagcatcaaaatcagttgaaacttttgctgttggtattataccattattgtatttttcaaccatagctacagttctacttattaagtttcctaaatcatttgctaaatcataatttattctcgttacaaaatttctatgagtataacttccatcttgcccaaatgcaaactctcttaataagaagtacttaagtgtgtctattccatatctttctattataggttctggataaaccacattaccttttgatttactcattttatcatcagcaaatagtatccatccatgtccaaatacttgttttggaacttctagacctaaagccattaaaagcgctggccatattattgtatggaatctcactatttctttacctactatttgaacattggcaggccaatattttttaaattcttcatcattatcagtcatataacctaatgctgttatatagttacataaagcatctacccacacataaattacatgtttttcatcaaaaggaacttttataccccagtcaaaagtcgttctagttacgcttaaatcttctaatcctttgtctaaaaagtttgccaccatttcattttttctagcagcaggaaaacagaaactatcatctttaaataactcttttaatctgtcttcatatttagataatctaaagaaataagattcttcttttactaaatatgtttctcttccacagtcagggcatttatttccttctagtaattgagattctgtccagaaactctcacaaggagtacagtatctaccttcatattcacctttatatatatcaccttgctcatatagtttagtaaatatcttttgtattatgtctgtatgtcttttttctgtagttcttataaaatcatcataagatatatccatagtattccataaggcctttatatcttttatcattccatcaagatactctatctctgacattccttgttctatggctttcttttgaattttttcaccatgctcatctgttcctgttaagaactttacatcatatccacagaaacgcttgaatctagctattgtatctgcagctactgttgaataagtatgtcctatgtgtaatcctccacttggatagtatattggtgttgttacataaaaactcggtttgctcatgttatttacctcctaattttttatcgttcgtaatcatatgattctttcatttaaataataaaaaatcgcctcctatgagttaacataggggcgagattattcacggtaccaccctaattcatctataatagttatgtttcacatgaaatgtagaaacattttatagataccttagtagactataacgtgtccaaccgttttaccctagcacacttgctcagataaaaagctccaagaccatcttcaataaagcttttgacactagctttcacctaacctagctctctgatagaaaaaacctttatttactcttcttttcatagcttgtaatttgtattactatttgtttctatataatcactatattataaaatttttcccatattgtcaacaaattatacaaatattacatagcaaataaaaacagctgctatgacacctgcaacatggctaatcatagcacatgataatgtatgtctagtattttttatcttcagacttccatagtatattgccattgtgtaaaaaatagtctcagaagaacctacaatcgtagcacccattttttctactaaacttcctattccaactctatttgcaagttcactgtacatccctaaagcaccacttccagataaaggttttacacttattagacctattaattcttttggtatactcatcatatttgctattggtgtaaatagccattctaacatatcaagacctttaccagttttgaatattcctattgccaaaaatatacctattatatatggtaggatatcccatgctgcttttaatccatcaattgctccttttacaaaactatcatacacatctatttttttatatttaccataaactactatgtacagaattattattggtataagtaagtttgaaaatatctccatgtatctacatcccctttatctatatcttctttgaaaaaatttacatgttattattgctactgctgtagatattatggttgcaaataaagtcgtaaaaattatttcacttggattttgagcccccatatccatccttaatttgattatagtaaatggaattatttgtatagatgatatattgattaccataaacataatcatatcattagtggctgtatctttcttgttattcaaagtttgaagctcactcattgcttttaaaccaaatgctgttgcaccatttccagcacccaacatatttaaagcaatattcataactatataagacattgctttatgaccctttggaatagaaggaaataatcttctcattataggatttagtttttgacctatcttttcaattaaacctgattcttttgcgatattcattatccccatccagagtgccatgataccagctagacttattgcaaactctataccttttgatgtttcacttaatataactttatttaattcacccatatttttagaaatcaagcttcctattattcctatcgataccatataaaaccatatttttcctattataatcatcctcctctttaaataattttatgatagttaggtaatactttatacttgaaagttgtactatattatgttttagtataagtgtgggagtttttacaatttttaatatttaataataattaaggagagaaataatgagaaatctaacacttcttactgatttatatcagcttactatgttaaatggctattttgaaaagaatattcatgaagacattgttgtatttgatatgttttttagaaaaaacgcttgtgatggagggtatactatagtttgtggtattgatcaggttgttgaatacatagataatcttcatttttcagatgaagatttagagtacttaaaaaacttaaatttattttctgacaagtttttaaaatttttaaaagaatttaaattcacaggagatatatatgctgttgaggaaggaactatcatgttccctaatgagccattaattactgttaaggcacctttatatcaagctcaacttattgaaacagcattgttaacaatagttaattttcagtctcttattgctactaaagcctctagagtttgctttgcagctcaaggagaccctgtatttgaatttggattacgtcgtgcacaaggtccagatgcagggatatatggagctagggctgctgtagttggtggttgtgctggaactgcaaacgtactagcagggaaaatgtttgatatacctataattggtacacaagctcacagttgggtacaaaaatttgataatgaacttgaagcattccaagcatatgctgatgtttatccagataaatgcctactacttgtagatacttatgatgtattaaacagtggagttcctaatgcaataaaagtattcaaaaatatttctgaaaaaggatacaaacctatgggtataagacttgactctggagatttagcttatttatctaaagaagctaaaaaacaattagataacgctggcttttcagatatcagcatcactgcatctaatgacctagacgaatataccataacatcacttaaagcagaaggagctactataaattcatggggagtaggtacaaagctcattacatctttcgattcaccttctcttggaggagtttataaattagctgcatcttgtgaaaaaggagttcttgaacctaagataaagatttctgagaatccagaaaaaataaataatcctggttacaagaaagttataagaatatataacgaagacaataaggcagaggcagatttgattatgttacatgatgaagttatagatgagtctaaacctttagaaatcttccatcctacttatacatggaaaacaaaggtatttacaaattacaaagttaaagagcttcttaaaccattgtatataaaaggcagatgcaaatataataaaaaagctgttcttgaaataaaaaatcatgtacaatatgaattaagtactatctgggaacaatacaaaagactttcaaaaccacacatttataaggttgatttatctagaaatctttggtatttaaaaacacaaatgatagattctaaaaaagttttatagtattaattatttttatttaagggggactgtttatttatggatgttacagattacagaatcatagaaattttacaggatgatgggagaatttctatgaaggacttaggaaaaatagttggtttaacttctcctgcagtttcagaaagagtcaaaagattagaagagtctggtgttatagaaggatataaagctattgtcaacccagattcattaggcagagttataaaggcatttattcatatttctcttccaagcaatggatatacagaatttattgagtcagctgcaaaggaccctaggattgtagaatgtcaccatataacaggtgatgattgcttacttttaaaagtaattgtaaaagatatgtacgagctagaaaatgtgattgatactataaagaaaattggttctactaagacctctgttatactatcaacgccaatacaagcaaaatcaatattgtaatataaattaaatactaatggtttattaattaatagaccattaagtatccttaataaaatttcaatttttgatataaaaaaagttgtctttcataattttacaacaaagacaacttcttttatgtttttgaaatccgtatatttcaaacttcaattaatcatctaaaactcaattatattaactaaatttatacatgtgtataattactcttatacaagtaatttgttaaaatatattccatatatgtctttaacacactgacttctccactcttgcccaataattttactgtagacactatatctgcatacccaagcattattacacctatagtgtcctcatctactaagttaaatacattaattaattctttcctactcaaatcatttttcttatatagagacaaaagtatcatatgatatcttacatatttacttataagtctatatgtctctgttgataactctaactttattcccatattgtcaattatttgagcacctattttttcatgatttgtgaaatgaactcttccggtttcatctaaggtcatactatcaggcttacctatatcatgtaaaaatgttcccaactttaatacatgtaacttatttattccttcttcaatatatgtgtttaaatagtttgacacatgttttcttagatgtattggaaaaaaatccttatcatttaatactatttctaattcttttaatgcatttatagaatgttcaaaacaatttactacatgatatttacattcacctacagacttcatacagcttattttaggaattattttttctaattcatgcttattatctaattctataaatattttatgtgtatcttccctctttaaactctctattataattttccctatttccataaaatcacctcagattcaggttttataaatctaaaacttgtttataaaccacatctttctttaactttctatctttacaaactatttttattgcatcttttttgttcataccactttcaattagttttaaaacatattccctatctgtaagcccatcataattttctttctttgacttctcaccatgaaaaccctctactattaatacaaactctcctcttacttctttttcctcaaatatttttatggtagtttctatattttctcttattatttcttgatatttttttgtaagttctctatttatagaaatattcctattaccaagaattttaagcatatcttttagtgtatccttcaatctatgtggtgattcatagaaaattatagttctactttcttcctttaattcttccaattgtgctttcctaacttttttatctctatctaaaaagccctcaaaaacaaatctatgtgtgtccataccagagccaactaaagccgttacaaaggctgttgcacctggcaatacttctatctctatgttattttgtatagcttgttttattatctcttctcctgggtcagatataccaggcatacctgcatcacttatcagagctatattttcaccatcaattagtttatttatcaaataatctccctttgaatccttattatgttcatgataactagttagtggttttgagatttcaaaatgatttaaaagttttatactatgtcttgtatcttctgctgcaatcaagtctacttcttttaatgttcttaaagttctatatgttatatcttctaggtttcctattggtgttggacatatgtacaatttcccactcatttacaactctcctatatctttattattatatattgcttttaattcttttgtataattcccatcttctccataaacatacaatgggtccaatattttaagctctggtcttccatcttttacaaattgaaccaaaactaagttcggtgctttttgaggtcttggatgcacaaattgaataacctttggttctaatttatattttctccctaaagttattatatcaaccaatcttgttggtctatgtatcatgaagaattttcctctaggcataaccaatctggatgaagctctaattacatcttccaaattgcaccttacttcatgtcttgatattgcttttttatcatttggattttttattccatcaatatgcatatatggaggatttgatgtgactacatggtaaccatttatgtctaagactttgtctatgtattttatatcttcatttataatctcaactctttcttctaatccatttaattttatagaacgagttgccatttcatatacatcttcttgtatttccacgccaataatttttttagcttcactttttccagctatcaaaataggtataattccagttccagtacccaaatctactactttggcatctttttttattttagtaaaattggctaataaaactgcatctataccaaaacaaaaaccattagtatcttgtataattttaaggccttttaattgtaaatcatctattctttctgaatcttttaattgcatatataaattctcctcaaatattaataactttaagcattaattgctttaaaaaaggtaggaaaagccctaccttaaatttaatcttctaatttctttagctctcttagtgtggcttcatctaatccatcattatccttacatttaccaccacagccatcacattttttaggctctctaagtatttttatatcttctcttgtgtatatctttactgtcttgtcttgaaattccactttaatttgttctaataaaggattcacttctacaacttttccttttccatcatctgattgcaccaatgcacctacaacaggcattttttctattgcttcactatatacatcatgctcatattttaagcaacagaataatctcccacatattccagatatttttgttggatttagagatagactttggtcttttgccatttttattgaaactggttgaaaatcacctaaccaagatgaacaacaaagttttctaccacaaggccctagacctcctatagatttagcttcatctctgacacctatttgtctaagttctattctagttttaaatatagcagctaagtcttttaccaattctctaaaatctattcttccttctgctgtaaagtaaaaaatcaacttattcctatcaaacgtatactcacaatctattaaaaacattgttaactcatgttcttttattttttgttggcacaactcaaaagtttcttttgccttttccttattttctagatatacttttttatcttcttctgtagctattcttataattggcttcaaaggagaaactaattcgctttcatccatatcttttggaccaacgactactttcccatactccaagcctcttgcagtttctacaactacatccatatcttgctctatattaaaatcaacagggtcaaaataatatattttcccagcacttttaaaccttatacctactatctttatcatttaatcacctcgtatatatttaaagacataacttgtatgcttatattgaaattgcaattgctttttattttactctttgcatcttctattatatcaataatcttggacaattgagaataactaatttttccactcatattttgaatgaaaactagcttatctacatttattaacatgttcttgtttacattttcttttaataggatgatatctcgaaaatagtttatcatcatatctaataaagctataatcttacctctatatttttccatattgtttggtatatttaaaatctccactatgtttttatctaacattatctgaatatactgttgtatatcttctctcatcattgaaaactcagaagactgagatagatttagagcattctcaatacttcctctcgaaaaaatagccaataattgagctctttcttcttctatacctgtatttatcaaataacgttttaagtcttcaattggtataggtgagaactttattatatcacatctagattttatagtttctaataaagattccttgttgtttgtgactaagattattatagcatagtttggaggttcctctagcgtctttaaaagtgcattttgagcttccacagtcattttttcagcattattgattatatatattttatagtctttatgaggtcttattactatatctgattgtaaatttctgatttgagctatttttatactatttccatctggttttatgagtacatagtctggactattttcgagattttcataatcaagtaatagttttgataattcatctgcaaatttcttttttcctattccatccattccttcaaacatatacgcattattaagtttatttttctttatagaatttgttaaatatttctttgcaaaatcttgccctataatattttcaaaatacatatttatctctccataggttttattgaatcaagaactattttataaatttcattatgtatactttcaatacttcttaatttgttatctaaaacacaatttatttttttccaatcatatttatctgctatatataaagcattgttgtaagatttctctaaatactctatgtcactttcatgaatatcctttttttcttcccctgtaattttattttttctattctccataagctttttactaaattcaataggcacatctaaaaatataacacaatcaggttgtggtatcttaaataaattaaattcataatcagctaaccaatttaaatactcttctctatcacaaatatccattttagaggcctgatgtaccatattagaggttgtatatctatctgcgataattattccaccttcattgtaaaactcctcccaatcggttttaaatgatgcatacctatcagctgtaaaaaaagttgatgctatatatgggtctacatctgatgcatttttaccaaagtctccttttaggtacattttcactaaggcagatgatggagattcataatttggatattctacctttttaatcatatagccttctttttttaatctttcatataatatttctgtctgagtagcctttccacttgcatctgaaccactctctataattattaacttacctttcattttcatatcctccatacaaacactttttacttttttagtacttttattagatagctctatataagcagtctatttatttctcttcacaattttaaactatctacttctatctacttttatatcataatttttaaatgtcttctaaatctattacttgtataaaatttaaatctacatctttcaatccactcacaatcatgcctttagaatgacaaaacattagatagtctattatttctttacttattacttcaccaggagatattacacttattccaggtgggtatggaactatacattcaccacaaattttacctatgctgtcatatattttaacactttttttagttttataaaatgcttctctaggtgttaatattttctttggaataacaacagggtattttttattttctaacttttcaaatttaaagtcttcctttacaacattgtttaatgctgtttctaaactagagaaatcctcagcagtatttcctattgtacatattaaaagaactccataataattagataactccacttgtatgttatatttgtttctcaaaatattttctagttcataacctgttaaacccatgtttttagatgatataaatatttttgttttatcatttgtgtcatatatattaatatttgaatcaactttatctttgaaaattctaatattatttaaaagctcttccattaattcttttcctttattttcatatatatctactgctaattccagagaagataataataaatatgaagggcttgaagattctgtaattcttaacatgttcaatattttatctatatcaactcggtctccctgtatatgtatcattgacgattgtgtaaatgctggaagagttttatgtgtactctgtacaactatatctgcaccttgctcaagagctgttttaggaagcctctcactaagccctaaatgcgcaccatgtgcttcatctactatcactaccatctttttgctatgtgcataattacatatgtattctaaatcatatgtcattccataatatgtaggataagtaagcagtactgcttttgcatccaagtttttatctattatatcaatcacattacttatagatatcccttttaagacatttgtctcttcacttatctcacaaggcacatactctatatctatatctcctaaaatacatccatttataacagactgatgacagtctctatttgttattattttacttttaggactacatactgacattattgcagattgtattccacagctactaccatttactaaatagcaagtataatcacttttaaatactcttgatgcttttttttgtgaattttttataattccttccggaaagtgtaaattatctgttcctaatatctcagttgtatccattttatacaaattttttagtatatctttatatcctaactttttataaacctgtccctttttatgaccaggcatatgaaaagatattacttcttcatttacaatcttatttaattcattaataataaacatatattaatagtactccttttttacataatacttctttttaaaacttcaattcttatctattttaccattaaaaaagaaacaaattaatatttttataaaattaaatacctcattctaaacatttagaatgaggtatttaacataaaagcataaattattctctatcatcagacattaaacttggtattaagtataatccagctaaacctacaatgaagtatattattctacttaccatttcatatgttccaccaaagatactacctattaagtctgtacctagaataccaattgcaccccagttaagcgcacctattatagctaaaattaaagcaacttttttcacttatatcactcctcaagaattaaatttttataaagtccataattcctgtgtttagttttcccgaaatgaaaaaataaatacgtattttttgttttttttgacaaaaaataaaaaaaattacgtggctacgtcctactctcccaggcagtttcccaccaagtaccatcagcgctagagagcttaacttctgtgttcggaatgggaacaggtgtatcctctctgctattgtaaccacataatctttatgcttaatatttctattaagtttttaataagtttatagaacctagtaatactagtttctttagagttagcactctaaaaactacacatatatcttaatgaatgaacatcaaataaatattggtcaagtcctcgacctattagtatcgataagctaaatacattgctgcacttacaccttcgacctatcaaccagatagtctttctggggtcttacccttgcggtgggaaatcttatcttgaagttggcttcgcgcttagatgctttcagcgcttatccattccgtacatagctacccagccatgcccttggcagaacaactggtacaccagaggtacgtccatcccggtcctctcgtactaaggacaggtcttctcaaatttcctacgcctgcgacggatagggaccgaactgtctcacgacgttctgaacccagctcgcgtaccactttaatgggcgaacagcccaacccttgggacctactacagccccaggatgtgatgagccgacatcgaggtgccaaacctccccgtcgatgtggactcttgggggagataagcctgttatccccagggtagcttttatccgttgagcgatggcccttccacgcagaaccaccggatcactaagtccgattttcatccttgctcgacctgtatgtcttgcaatcaagctctcttttgcctttacactctacgtacgatttccgaccgtactgagagaacctttgagcgcctccgttaccttttgggaggcgaccgccccagtcaaactgcccacctgacagtgtcccaagaccagattcatggcctatggttagagtcccagtactacaagggtggtatcccaaggatggctccgccaaaactggcgtcctggtttcaaagcctcccacctatcctgtacatgtagtaccaagacccaatgtcaagctacagtaaagctccatggggtctttccgtcctgtcgcaggtatccggcatcttcaccggaattacaatttcaccgagtctgttgttgagacagtgcccaaatcgttacgcctttcgtgcgggtcggaacttacccgacaaggaatttcgctaccttaggaccgttatagttacggccgccgtttactggggcttaagttcactgcttcgattgctctaacagatccccttaaccttccagcaccgggcaggcgtcagctcctatacatcgtcttgcgacttagcagaaacctatgtttttggtaaacagtcgcttgggcctattctctgcggccacctgatggtggcaccccttatccctaagttacggggtcattttgccgagttccttaacaacagttctctcgctggccttaggatactctcctcacccacctgtgtcggtttgcggtacgggtacctttaacctcgatagagacttttcttgacagtgtgaaatcagctacttcgctactaaatttcgctccccatcacatcccagcattatcaaagcggatttgcctactttgactgcctcaatgcttgggcacacataaccaacagtgtgcttagcttatcctactgtgtcatcccttctctcaaacggttatcggtagtacaggaatatcaacctgttgtccatcacctacgcctttcggcctcagcttaggtcccgactaacccagggcggacgaaccttcccctggaaaccttgggtttacggcctgtgggattctcacccacatctcgctactcatgccaacattctcactcccatactgtccacatgtccttacggtcatgcttcaacccgtatgggaagctcccctacccatcattactgatgccgtagcttcggtagtaagttttagccccggaaatcttcggcgcaggatcactcgaccagtgagctattacgcactctttgaatgagtggctgcttctaagccaacatcctggttgtctgtgcaatcccacatcctttaccacttaacttacatttagggaccttagctgacgatctgggctgttgccctttcgactatgaatcttatcacccacagtctgactcccaagtataagatgacggcattcggagtttgatagtcttcggtaggtgcaataccccctaggacattcagtgctctacctccgtatctctcaccttgaggctagccctaaagctatttcggggagaaccagctatctccgggctcgattggaatttcaccgctacccacaagtcatccccgagcttttcaacgctcgtgggttcggacctccacgaaattttactttcgcttcatcctgctcatgggtaggtcgcccggtttcgggtctacgtcaagtaactgaacgctcagttaaaactcgctttcgctacggctccgcaccttaagtgcttaaccttgctacttaacgtaactcgttggcccgttctacaaaaagtacgcggtcacacaagaaatgtgcttccacagcttgtaagtgcagggtttcaggttctatttcactcccctcccggggttcttttcacctttccctcacggtactatacgctatcggtcactaggtagtatttagccttggagggtggtccctcctgcttcccacagggtttcacgtgtcccgtggtactctggatcatatctgaagtcttctcgtttaacatacaggactattaccttctgtggtgggtctttccaaacctcttcaattacgatacctcttcgttatgatatgtccgcaaccccaataaagaaaactttattggtttgggctaatccgcgttcgctcgccgctacttacggaatcgaatttctttctcttccttcaggtacttagatgtttcagttccctgagttcccctcattaagctatgtattcacttaatgatacttagacattactctaagtgagtttcctcattcggaaatcttcggatcaaagtttacgtgcaactccccgaagcttatcgcagcttatcacgtccttcatcggctcctagtgccaaggcatccgccctgcacccttaataacttgaccagttaaaaaggtttgatagattagaagctatcaacttcgataattttaaaaagttatcagctttatatattacaaattagatgtcatatcactaaatatatatgcagttttcaaagtgctaaagcacggcgccaacggataaatcccgttgctaaaagtgctaattttgagtattcgtaaaaacgaaccctcaaaattaaacagtaggtaattctccttagaaaggaggtgatccagccgcaccttccgatacggctaccttgttacgacttcaccccagttattgattccaccttcgacgacttcttccaaaaggttagataatcggcttcgggcgtctccaactcccgtggtgtgacgggcggtgtgtacaagacccgggaacgcattcaccgcagcattctgatctgcgattactagtaactccagcttcatgtaggcgagtttcagcctacaatccgaactgagagtagctttaagggattagctccaccttacggcttggcaaccctctgtactacccattgtagcacgtgtgtagccctaagcataaggggcatgatgatttgacgtcatccccaccttcctccaggttatccctggcagtctctctagagtgcccaacttaatgatggcaactaaagacaagggttgcgctcgttgcgggacttaacccaacatctcacgacacgagctgacgacaaccatgcaccacctgtcaccaatgtccccgaagggaactctccgattaaggagatgtcattgggatgtcaagcttaggtaaggttcttcgcgttgcttcgaattaaaccacatgctccgctacttgtgcgggtccccgtcaattcctttgagtttcactcttgcgagcgtacttcccaggcggagtacttaatgcgttagctgcggcaccgaagggggtaacccccgacacctagtactcatcgtttacagcgtggactaccagggtatctaatcctgtttgctccccacgctttcgtgcctcagcgtcagttacagtccagagagccgccttcgcaactggtgttcctcctaatatctacgcatttcaccgctacactaggaattccactctcctctcctgcactcaagtctcccagtttcaagagcttactacggttgagccgtagcctttcactcctgacttgaaagaccgcctacgcaccctttacgcccagtaaatccggataacgctagccccctacgtattaccgcggctgctggcacgtagttagccggggcttcctcctcaagtaccgtcattatcttccttgaggacagagttttacgacccgaaggccttcatcactcacgcggcgttgctgcatcaggctttcgcccattgtgcaatattccccactgctgcctcccgtaggagtttggaccgtgtctcagttccaatgtggccgatcaccctctcaggtcggctactgatcgtcgccttggtaagccgttaccttaccaactagctaatcagacgcgggtccatcctgtactggctcacctttgatattcaagagatgcctctcaaatatattatcccgtattagcatacctttcggtatgttatccgtgtgtacagggtaggttacccacgcgttactcacccgtccgccgctctttaccgaagtaaatcgctcaacttgcatgtgttaggcacgccgccagcgttcatcctgagccaggatcaaactctcaaataaaagtttatcaggctcagatactattgttatcaaaatatctggctttatggtttgtttcttgttttataaattaacctactgtttaattttcaaagttcattttttatgtttgcccttttcttaaggacaagtaatactatatcatcttaaaaatatttcgtcaatactttttttgttttttattttaaaaaaggttataacttttggtttttttaataaatataattaaaactaatagatataacccttgatattacaaacaatacatgcatatataattttacctattttgcaattttattttcataagaatatgaattagctctcactctatctgcccaaatatttatactcttaactttattaacattagttgtaccctcaaaaatatccattgcatccttacaaaaatatatcataacatcaagaaccaaaaatccaacacaaaataaacataaaaaattaattacttgaaacatcagacattcccccaataattttttatatatagtattctcataaattattctttttaccttctcataaattattctaaatattttcataataaattactttcaatcatattttctaaatataaagtctcaatcaacaaaaactaatatcaatttctaacgtttgttggtaatttataaattaaatatctaaaagaatctttgaagcatataaaaagcattctacactgacattttaaacaaaatttagctatttattgctaatttaatagctaaactttatttaaaacttagtagaatgctaatatttcttagttttcttcttctttatttggattgttatcaataggtttcatagtcgggaataataatacatctcttatagatggagagttagttaataacataattactctatctatacctattcctagtcctcctgtaggaggtagacctacctctaatgcttttaagaaatcttcatccatttcaaaagcttcatcatcacctaattctctttttctcaattggtctataaatcttcctttttggtcaatagggtcattaagttcagaaaatgcattagctaactcccacttattagcaaatgcctcaaatctatcagttcttcttgggtcttcaacatttctcttagataatggagatacttcaactggatgatgagttataaatgttggttggattaatttatcttctccaaattcttcaaagaaagcatttattacttctcctcttctcattccaggttttatctctatacctttttctctagcaacttctagtgcctcttcatctgtatttatagtagaaaaatctacaccagaatattctttaacacaatcttccatactcattcttttccaaggtggtgtaaagtttatttctgttccttgatagttaactatcatacttcctgtagcaacttcagccatatgtgcaataacattttctgttatttccatcatatcagtatagtctgcatatgcttgatataattctattgcagtatattcaggattatgttttaaatccataccttcatttctaaacattcttcccatttcataaactttatcaaatccaccaacaataagtctttttaaatacaattcatttgctattcttaaatacattggtatatgtaaagtattatgattagttataaatggtctagcatttgccccacctgctatagtatttaatattggagtctcaacttctaaaaatcctctatcatctaagtatgctcttaatgcttttaatgcttttgttctaattaaaaaagcattttttacttctggatttactattaagtcaacatatctttgtctatatcttagttcttggtcttttaatccatgatatttttctggtaaaacttgtaaagatttacatagtaatactacagatttagcctttacagatatttcaccttttttagttttaaagatttctccttcaattccaactatatctccaatatcatatgttgaaaatacactatattcttcctctcctatagcatctagtcttacataagattggattcttccctcttggtcttgaatatctataaagccagctttcccttgtattctcttgctcattatacgtcctgctatttttgtagttttaccttcaagagaatcaaagttatcttttatatccatagaataatgagttctatcatatctactttctttaaaaggatctctacctgactcttgtaatttttttagtttatctcttcttacttgaagtacttcactaaggtcttcttgaatttgcgcttcttcattgctttgttgattatttttcatttttttcctccaaattatcttcttatttctaatatttcaaacttagcaactccatcaggaacttgcacttccacaacttctttcgcagctctacctaaaagtgctttccctacaggagattcgtttgatattttaccatcatatgggtctgcttctgtcgaaccaactatagtatattcaacctcttcatcaaattctaaatccttaactttaactattgatcctattgtaacaacattaaggtctattttgctttcatctatgataacagcttttctaaccatattttctaattttaaaattctttcttcaacttgtgcttgttcctttttagcttcatcatactcagcattttcagataaatcaccaaaagatatagcaacttttattctctctgcaacttcttttctctttacaacctttaagttttctaattcttcttctaatttatcatatccctcttgtgtcaataaaaactctttattttcttccattataaatacaactccttcacaaatttcttaggaattttcctaattatattttaaaaattttataatctttttttaatttatgcgctatattataagtcactattatttttatgtcaaggagtcttccatatagtactccaatttcgacacaacttcttgatagtcttctattttgttaatttcatcccttaattttgcagagtttctaagtccttttaaataccaagcgatgtgttttctcatttcccttacagctacatactctccatgttcttctactgcaagttttaaatgcttaatggcagtacttattttttcgttaagagttggctctggcaaaatctcgcctgtattcatataatggtttattcttttaaatatccaagggttaccttgagcacccctacctatcattatagcatcacaaccagttttgtctaacatatttattgaatcttctattgtaaatacatcaccatttcctataacaggtatactcaaatttttcttaatctctgcaattatatcccagtctgctttgcctgtataaaactgttctctagttcttccatgtattgctaaagcgcttattccacaatcctctgctatctttgctatttcaacagcatttacactattatcatcccagccttttcgaatctttaaagtcactggcttttttgagttcttcactactgccctcaatacctcttctgcaagcttaggatttttcataagtgctgaaccatctccatttttaactacttttggagctggacaccccatatttatatcgagaatctcatttgaataatcattcattatctctgctgctcttcccataaactctggttctgaaccgaatatctgaactgctacaggatgttcttcctcttctatcttaagcatttttttagtattttcatcatcatagcaaagtgccttaccatttatcatttctgtatataaaagcccacatccctgttctttacaaattaatctaaatggaaggtctgttacacctgccataggtgatagaaaaactttatttttcaattctaaatttcctattttcattgtttttctcctatttttgcctttattttgtgatttaactttaaattcttatttcctcattataatataccacatatagctagaaatctatcataaaaagggaattggatatataacccaattccctgtatattaattattcttggtttttttcatatattattctcaatccttctagtgttaaaaaaccatctacataatctatacttttcgtctctgaagcaatcagtttagctaatccacctgtagctataaccttaacatcatcacaattcaattctttcttcatcatacttattattttgtcaactaaaccaacatatccataaattattccagattgcatggctgatacagtactcttacaaatagtcatacctggcttagctaattctactctaggtaatttagacgcactttgaaataacgcctcactagatatttttattcctggtgctattgttccacccaaatattcacctttttcagagatagcacaaaatgtagttgctgttccaaaatcaacaagtatacttggtgctccatacttttctatccctgctacagcattaactattctatctgccccaacttgttttggattatcatattttatatttagacctgtttttatgcctggacctactattaatggctgttttttacagtactttatacaaaagttttcaagagaatgcatgacatttggaactacagatgatattataacatcatcaatatcacttatattcacattatcataatcaaataggttacttatcaggattccatattcatcagacgttttttccctatctgttttaattctccagtaattaactaatttgtcacctttatatatacctaaaaccatattagtatttccaacatcaaatactagaagcatatgtcattaaccttctttctattttttgcttttcttaagtacagtggcaacagcagctactactaaagcccctactattgcttctggcaccccatttgctgcggcaagagccattattacttttcctgctgaaccacttttacccattgcatgaagatacttgtcagcatataagacatatatcattcctaaaactccagctgtatttaacagagaacctattgcccctgtaattaaacctgatatgtataccttatttgtagccttaattattaactgatatacataataagctaatacacctatcataactcttggtaatattgaaactaatggatttataaaaacaaaagatgttactgttgggtttgttatagcatttaagagacttgatatcccaaatataaatcctattgctgccccaactattggtccttccataatagctccaataataactggtatgtgcattatagttgcttttgtaggtccaactggaataaatcccaatggagtcatagatagcataatagaaatagctgatagtactcctattatagtcatctttcttacatttacttttcttactgatgcacttgtgttcatcataaaaaatacacctccgttccagctcattaagatgccggactacttaattttttaatttttttcgtttttttcttataactatgagtcaagctaccattgtaggatgcccgctctaacaagaataattttatcaagatgagttgccattgtcaacaatttgacaagaaaaatatgctaatttcatcatatttctcgtttttttactatatctttatatgccattatattttctacactatccgctttttttactgcatttattatacttttttccacaacctctacagccaatgaacctactaatgttatatctgcttctatttctcctgttgatattgtgaatattgtatctccatcatgaggtgtatggataggaaaaatagacttagcatatccatcatgtcccatttgagatatctttttacatccagctttggttaacttagcatttgttgcaattatcccaattgtagtattatctacactaaatccacctttactttcaccttgtttcattaatttatatgtatcaattgtttctgtctttttatcatttaaagcaccagctataaccttaccattttcataaacatctccaagagcatttacagcaattaatgcagatacaattagaccattatctaattttatagaatagctacctattccgcctttcatagcatattcctgacctcttatttttccaacagtggctccacaacctgctccataatttccttgatttaaaatatcagtatttgcaacttcacaagctctataacccatctttaaatctggtctacatttaaagctccctactcctaaatcaaataaaactgctcctacaactataggcactttacctacacctacatcaaagccaattcctttttcttctaagtatctacttacaccacaagtggattcaagaccatatgcagaacctccagccaaaactactgcatgaactttttgaaccatatttacagggtctaataaatcggtttctctagtccctggagcagaaccccttacatcaacaccgcaagtagctccttcttcacatattactactgtgcacccagtaagaccatttctatcctcaacctgcccaacctttaagccttctatatccaaaatattattatacatatcctttttctcctcttatagaaacttcacctgaaataatttcttttatacttccatcacttctttgaactaataaatttccctcttcatttatgtctaaacatttcactagttctctattatctccttttaatacatatatatttttatctataattgcagaataatctctacatatttttaaggttttttctttggaattatttacagtataatctaaatataatttttcaaattcagtcaatacattcctaacaatatctactctggataacatatacccttctttatacaatgatgtggctttgtcagctatttcttgttcaaaatccattattttaacatttattccaattccaagaacaacataatttgttctttcaatttcagcagataactctgttaatataccacatattttttttccatttaaaataacatcatttggccattttattaatgtatttgctcctagattgtttaaagctttcgttacacttgctcctgctattaaagttataaatggagctttgaatggttccatatctggttttaatataatactcatccagattccttcatgagtttttgaatcccatcttcttcccaatcgtcctttccccatatcttgatgttcacttaaaatcacagtcccatctacactatttatagctatccttttagcatgttcatttgttgaatctatagtgtcaagatgttcaatattttttccaataaactctgtatctaatttatagtaaatattctgtgggcttaataaatcagttggattttccgctaatcgatacccttttttatttacagattctatattatatccctcttcttttaaggctttcatatgtttccatatagctgcacgtgacacccctaattgttttgataattcttctcctgaaataaattcagatttattatttaatataatctctattattttatctcgcatatttcacctctaatatgacataatttcatgacttattttcttctaataaataattatacattattaatatacttttaatactattaattttaaatttcctttttaattattataatggttgttttatattttatattgatgatttatataattttacattttatttaaataattttaaaataataaaaaactgaaagtatcaattaaattaatacatgcaaatataatttgcttattaatttaatattatactttcagttttagtatttaatccacatcagataataatcttaaaatgaccaaggtcttaaaactatttatctttatcagatttatcttctaaatttttatttatatcaataacattgtttctttcttcttcatctttttctaattttatagttaattgttcttcaacttctttagaagaattttcctctgtaactgcattttcaatttcattcagaggtaactctttattaaatgcttttacaaattgttctgcatctaaagtttcatatataagtaaagcttgtgctacatactctaatctatccatattttcttgtaatatacttcttgtcttatcatatgcaccatcaactatacgctttgtttcttggtctatctcaaaagcaacttcttcagagtaatttctcttacttgaaaaactattacctaggaatacttcatcatcactgtcaaatgacattggaccaagtttagaactcattccatactttgttaccatacttcttgcagtagctgtaactctttctaagtcatttgaagcacctgtagatacatccttaagtactagctcttctgctactctaccaccaagtaaaactacaatattttctttcatttcattttttgtagcatagaacttatcttcaacaggaagttgcattgtaaaccctccagctcttcctcttggaactattgtaacttgatgaacaggacttacttcttcaagtacatgggcacaaactgcatgccctccttcatggtatgctgtaagtcttctttctttctcacttattactttcgattttttagccacacctgctataacctttgttatagcttcttctatagtttccatcttaattttcttttctctttttctagctgttaatattgcagcctcattcattaagttctctatatcagcaggagtaaatcctggtgttcttctagccaagacatccatttttacatcatcacttaatggtttatttcttgagtgaactttaaatatagcctctctaccttttacatctggtgtaccaacaacaacttgtctgtcaaatcttcctggtctaagtaaagctgggtcaagtatatctggtctatttgtagctgccatgattattataccttgatttaccccaaatccatccatttcaactagaagttgattaagagtttgctctctttcatcatgacctccaccaagacctgcacctctttttctaccaactgcatcaatttcatctatgaatatgatagctggagcacttttcttagcctgttcaaataaatctcttactcttgaagcaccaaccccaacaaacatctcaacgaaatcagaaccacttatactgaaaaagggaactcctgcttctcctgcaactgctcttgatagatatgttttaccagttccaggaggtcctaccataagcattccttttggtattcttgcacccaattcaatatatttcttaggattctttaagaaatctactacctcctgcaaatcttctttttcctcatctagtccagctacatctttaaatgtaactctagttttttcatcatctttatgaaccttagcttttgatttgccaaaactcataacctttccgcctccaccttgagactgattcataaacacgaaccaaataatcaccatgaagaatattaacagtaatgtaggcaacatttcgacaaaccaaggtgtagatggcttagcttcaccaccaaaagttagtttcccagccttagcttggtctaacacctcatctgcaagtttatttcccatcacttctgttggaacatatgacttaaactttgtatttgtatcttttatagtaccttctacagaagtttgatttacaaagtataatcttgatatattctcatctgttaattctctatatacttcagagaattttaaatcttttattttttctgtaggcttacctgagaattgaactatacctactataattataaaaacaagtagataaaaacctgccccttttagcaacttattcaatatagaagccctcctttcatacattgctttgccctataatttgttaaaattaatttttaatacttcttttgtgttttcatcaattttataattttcactgattttataatctccaacacatattattccttcactatctgtgattataggaattttacatctttcttctcttgggatttttaaatctatgaataaatctttcacttttttacttcccatagcaagctttatcttatcaccttgccttctgcttcttattactatacccccttttaccttattaaaatcaaaccctttagatgaattgtctaatttcatactcttatacctatctatgctcattacttgggtctcaataatttgttttaattcttttattttaataaacccattactaggtacattgtaataaaattcaatttcctcattaacaatttcctcattcgttaatattatactgtctttttttctataaacaaatatatttcttggaagagttaacattttatttacttttgaattatcttctaaagacattatatcttctatatgtctttggtcaacaaaattagtatctcctagtatatgttttatggaatttctaagaactctaactttgatagcatcatgtaagcaaacaaaatcgtctaaatttatctctacaaagcctttttcttttatatttgaaacttctctaaatttagcttctgcctctttctcaatataatcgttatcactttttaaactattgctcatcctcactatagattctattacatttgaattaaaattatccttcatatatggtaaaaggtctaaccttatcttatttctagtgtatatattttctaaatttgttttatctatcctcggatttaaattataagcttcacaatactcctctatctcatttctttccacgtctaatatgggtctaattatgcaattatctctaatataatcaattccctttaagccttttaagcctgttcctctcatgatacgcatcataacagtttcggcttggtcattgagattatgacctattgctattttattggctttaatcttatccttaatttcataaaacatttcatatcttagcttccttgctccttcttctaatgataatccctcattttcacaatattttggtacattaatagactttacaaagaatataattcccatatcctcacaaagtttagatacatataatgcatctttttgagcttctatccctcttatttgatggtttaaatgtgctgcatatatttctatattaaaatctttttttaatctatttagtacatgcaataaacaaactgaatcaggtcctccagaaagacctaaaactattttatcgcctttttgtattaaattatgtttatttatagtacttagtaccttatcaaatatcatatttatccctcttacacttagttttattcacttttaagtatactttctataaaaaaacgctaaacccttgtatcaattttaagaaattaaagtttaatataaatataataataccaaataaattaaataaaaggtagttttttcactacctttataaaatttctggaaaatagccatagttattatttagtacctatgtatatatctattttattcctacctaaaaataaatcttgtacctttatattatagtctattttcaattttatgtgttccccttcttgtatatttatatctaattctcttgtatcaatatcaattaataaagtaccttgtggggtcacatactttgtagtactactttctccacatttaaacagcattgttgagttaatagcaccaaactttttgatactaacttgatttttaagtatctttatagtattagttatttctatattttcttctttttccttgtaaataacatatattccatcatttttataaaaaattttaccaaaggcagtcatctctatggtgtccatatttcctttttcatcatattgtctagtatttatacttatttttacactcaacgatttttcctccatagattcttcatataaactagtatttttgtatttctactttttgaatcttatcaatttttttctttaagaactctcttgctatatctgaaaatttttcaggtatatctgatacataatattgataagtcccatgaatttctgtattgtttataatattttgcacctctaaaatcttttttaaatcctttgcagtctctttagctggattaacaagttttatatgctctccaacttcttcacctattgttctctttaaaataggataatgagtacatcctaacactaaagaatctatatttttttctttcaattcttgtaaatatatctttgctgtcaatttagccacttctgtatttgcccatccttcttcaacaataggtacaaataaaggacatgctttattaacaatttctatactctcatctattttagatatttccaagttgtatgcttttgaacttatagttccttcagttcctattattcctacaattttgttttttgtagaacttacagctgttctagctcctgcttctataactccaattatcggtatatcatatttttcttgagcttcttttaagcttcttgcagtagcagtgttacatgctataactatagcttttacaccttttgtttttaaaaagtttatagcttgaaaagtatatttaattatagtttctttggatcttgaaccatatggtattctggcagtatctccaaagtatattatatcctcatttggtaatatcttcattatctcttttagaactgttaatccacctaatcccgaatcaaaaactcctattggtttattgttcatctttatacaacacctactttacatttttgtgtttaacaacaacttatttatcgctaaaatttatatttatattcataattaatatattattacctaaatgattattatagtttattttacacaaaaaataaaggagctatcttaaattagaaaataatttctacaaaaagacaactcctttcactacttaaaaatttaaatttattttgcaaacacatgatttcctattctcatataaggattcaatctatttatccatttgcaagtggctatttctggattccaaaaatatactgctttattagttgggtcagttccataaagagcttcctgagctgctttacgtgctgagtctgttggtgccatctttattgaaccatcaagcacaactgagaaagcatttttttgatatatgacttcttctattgtgtctggaaatctagggtccaatactctatttattactacagctgctacagcaacctgtccctcatagctttctcctctagcttctcctgcaaccaacttagataataacatcaagtcattatcagataaatttattacttctttctttgctatatttttttcttgtttgtttactttcttaatattttctgttggttcatatgcaaatacctctttaataggcataaatataaaagtcaaagctaatagtgtagccatcagtttactccacctgtccatgattaaaaccactccttacattcttatttttaaaattttttctctaaatccttgactacttcaagtactttaaacttaatttttactctacttgttttttttggtgtatcttgttttattaacttatattctttatcagttaaaacttccttcaacttatcatctgtagatttatctatcactccattagattcatcaacaaaacatagtggagggaacataacacaccaccagttttttccttcacctttcccaatgataatctttaatgctttatattcaccagctggaagaactatattagaatattgtttagtagggaaattgctatattgtatacctacctttacactgtaattatatccatttttaagaataatatttttacttatttcttccagactactatattccttttttataatagcttcactttcttttatactttttgaattttgaagctttggctgtaaatattttattacttcatctctaacttttagtttaagttcttgatcttcatctgtattgctgtttgctataacatgaaatcttattaatttatctttataatcttttgatatattgtctactttttttacctcaccatttattactattgtcattattgatatgactgatataagacttaatattaatagtcccaatctaatcttaatttttctcattgaaaattccccctcaagataaatttatatcatcaattatgtccaattaaatttaatttattcataatattttttaatactaataaaaaaagctatcttaaaatgattacaatcattttaaaatagctttttaaaccttatattttataagtctttactaatcatagccttatctatcataaactgctctgctttttctatatgctctgtagcatacttcttggatagctcactatcacctttaattatagcatcaagtaagtatttatgctcttcaacaatattatgtgatgtatcataagcagacatataggtaactctaaatctatatacttgttcccataatgagtttattagttggattaattttttattattagttgctttaaatatacattcatgaaattctacatcaagttttaataacgcatctacatcggattccaaagtgctttttttaaattcttctgatatatctttaagctttttaatatcttcatcactaattctttcagcggcaagatatgctgctaagccttctaggcttgctcttacttctaatacatccataatatcctttaatgacatatttgccacatacgcaccttttctaggcaacataacgactaaaccttctaattcaagctttcttattgcctctctcactggagtcctacttactcctaattgttctgctagttgcacttccattagcctttgaccaggctttaattttccttctaagattgcttctcttaaattctcaaagactacatctcttaatggcttgtaattatccaagttcagtttagttaaattctccacaaatttcaacccctttttgactgctattaacaacatacacctgtttatatttttttaataattctttttttccaattagagcatcttctttatttttaaatagtccaaaaactgtaggaccacttccactcatcatagaacctaaagcattatttttcatcattacttgttttatatcacttatttctttgtgtttacctatagtaacattttcaagaatatttaccatgctttctgatacagcttttatatcttcagattttaaacactctatcaaatatttattatttggtctttttttaatattattcaaatctaatccttgataaacttctttagtagaaacgaataagtctggtttgcatatcaatatatttgtatcacatggtaaacctttgatgtttgttagcttttctccaataccttgagctaaggcaggtcttcctgatatacaaaaaggaacatctgcgcccaaattaagtcctatttcttttaattcatcttcagataatctaagttcccataggtgatttaaacctactaatactgcggctgcattagaacttcctccagccatccctgctgctacaggaatatttttttctatgaatatttctacacctttttttatataaaatttatttttaagtattttggcagctttataaacaatattatcttcatctaaaggaatatctaaactagtgctttttacctttatttcatcttcgtctaattcttttatctttactatatcgtataaatctatcgtttgcattatcatttcaacaaaatgataaccgtcttgcctttttcccaagacatcaatggataaatttatttttgctctactctttagtcttataaaatccattctatcctccttgtttaaagaataatgcatcactaacaataatattatactacaaaaaataaaataatagggtattataataccctattatacttaattactttaaattttttaatattaatctactaatacgacttttttttctaaaataagacacttaccaggcttaattggttcatcaagttttatatcattaagttctgcaatttcattttctgttgtattgtatttttttgctatattccagaaagtatctccttctttgcatatatatacgattatgctaggagctttagataaatcatatacaccttggtcttctcctttgataataaaattttctgctttcttatctaatgcttcagtaaatctcttaattttgataatcaagtctatctggtccctattcaaatcaacttcgactttatcaatacatgctgtattaaacacagatgctgtatcagttagattatccatttctatatcatgttcaaatggaatttcctcactaattttataaaccaattttaaaccttcaactgggacaaataaaatttcaacttttatgattccttgtataatgcttttatttccttcaatataactattttctatagacatggttggacaaacgcttacaatatcttttatttgtatatcatcattatcatttcttatgccttctctaaccataaatgtttcttcactacgtcttaaagtcttatttaattgaataggtttgtggtcaaattttattatcttttgaggcgaatatgcatcttgtaatacttctcttgtaacttcatctgtaacttttaccttacaacaagccatacaatctatttctaaaagacctgtgttgctttcactattttgcttgaaaatatgattaaaatctgacatagacaacaatacttcttcagtcataccatcactaactccagggacttctacaaattgagtaaactcaatacctactctatccaactctacaagttcaccctcatatgtacaagctaacggatttatttctaatactccaccaataataactttattgtcagtcactctactttcttttactttaacacatggatttaaacttattatagattgaatttcctctgtgtttattgttatagtatctcttatagaactttctgctttttctattccaactatatcttgaaaacaaatttcctttctgtgcttttgtatgccttccacttgcgccacatcttttacaatgtctaacctttgcttttcaaacaaacttccccttatattcataagagctcctactttaatctttctctcattcattatagtacaatccatatgctctacttctgaaaataacatgtattccatatcttgaacaacattgtctttttctattacttcgtttatatctacttttccgtctacattagaaatagtatttttatcatctgcaatatagattacattataattaaaactacctctgcaaagtatcttcccatctgccatttcaatttttttaagtgatatgtatccttctgtttttacaatttcatatacatctaattttttgtctggtacaactgcctccgcttcaatgaatgtttgaaattttccaaagtctattctattgtcaactttaattacatctttaattaattccatagtctacctccttaagtattataaaaatatcacactatatttatatttaaggagcaaaaaaaaaattacacctatttttaaataggtataattttaacttatttgtaatttatcttgatctctaaaaacttgcaactttacattagatgttaataaatctgagtaactataagatactctaggatatccattactttcatcatctaactttataacaaacacgcttggataaactttttctagtataccctcttttgtaataatctgctttcttcctttattagctttcaacaatattttctttcctatatgtctctctaagcttactcttatcttatctagagtttgaacagtagccacaatatcaccttctttaacgtttatatgtttacataatatcacatataaacatttttgtcaaatgtttaaactaattattttatatattttttgcaaaaatgtcaatactatttttgaagatatacagtataattatgttaatttttgctaatgtaatattgtttttggcattgcccatctaaattttcctcttgtttcagaaccaccaattcccttaacacctgtaatagtctgctctataacctcatcaataggaactactacatcaattcttgaacaagcaattttctccactataaaaacagggtctaatgcatgtatcattattcttccaggcgaacttgcataatttgctcctgcacttattattttttcataatttgattggcatgctcctgcgaatatgacaagattatccaaatttggttgccatttacgtgcttcttttactgttttaacaaaatttgaagagtttctatagttactcatatcttctatatctcctctttttattgtcattgcatcatgacctgttattactagtatatccggattatatttttctagtagtgctcttacttctttatactgattttgctctgaaacagctacacctactgcaggtattccaagttgagcatatacatccaagcaaatttttaaatattctttatctccatctatctgtagtacttttccaggcattccatatgtgttaggatttaattgaagttttggaactgctctagtcattcttttttgtctttctttagcttttcttactgacttatataataaattttctacatttttatctattaatatatcttttatatcaggtgcttttactaattctaggtcatcaatataagcatctgctattactctaaatgcaattccctttagtatagctattttctcattattttcatctacaccaaaagagactattttaaatactatatctttgttatgtgactttctagctacaatgtctcctaccttcatagttaaacctccaataaatttttatcttagtttatactatgttcgatataaaactttgtttcctaatgtcaaaaaaacatttcttataatacttcttttatcactcttaaagcatttttatagtatatcttttctatatcatcttcactaaacccttctttttttagaggttcatacagtttacccatctgagatatatcttcaatctcaacttttgaatctattccatcaaaatctgaccctagggatacaacatctattcctccaacatttacaatatgttttatgtgtctaaccatatcttcaagtttactttcacttttatcacttaaaaataagtggaagaagtttatacctgtaactccacctttatttgctaatactttaatcatatcatcagttaaatttctagaatgattcatcattgctcttgaattagaatgtgtagcaattattggtttagaagaaatctttgcaatttcataaaatccaccatctgaaatatgagaaacatcaaccaacattcccaattcattcatcttatgtaccacttctcttccaaaatcagtaagccctttttctctatattctactttattatgaggaaagctcaattcattcacatgattccaacttattgtcatcattctaacccctaagtcgtaaaatttctttaaattttctaatttaccttcaagtactgcaccttcttcaatagataaaagagctgtaagtttaccttctgattggtttttcataatttcttcatagttagtagctaaagctatttcatcactattttttttcatttcctcatgaaatttatttgccatactcatgcaataatcaaaaggatgttttacttcttcagtatcaacaaaaagagcaaatgtttgagctaatgaatccccctttttcaatctgtctatatcaacagaatatttattagacttaagttcacttgtttctacattttccattaattttgctatagtatcacaatgtaaatcaataaatttcatatttataccccctgtatattttatatttatatctaaaaatagaaatagttgtccttatagacaactattgacaactattttttaatattctttttaatattacttaatcttattcttcttttaagttaggtattacttttttaacttcttcaatttgatgccatgttttatctatattattttcactaatatatttttttaaatcagttaaagatgtaaaatctttaactgataaattgtcatcatcatctgcaaatcttaaaataaacatgagactcccttactttccacaacatttcttatatttttttccgcttccacatgggcatgaatcatttcttcctatttttgcttctttaactattgttttagacttcttataagcctttattatttcttttctttggtctgctggtagtatatcttcccaaccttgtaaattatatagccaatgagcctcaacagttaccatattgttatataatttttcccaatctatttttatagaaacttctttatcagcttctacttcttctaaaactatatcttcttttaagctttcacttattccatctatgaatcccatgaaaaattcattagtagttccaaatttttcagccaattcacttactttaccttcaacaacatccattttattatttaatatttcattgtatattccagcttcaactttcaaatattcttcccagaattttacttctgcttcttgactttcatgattatcacttaaatttctccattcagtatataaactcatactttttcctcctaagtatacctatatttttatagtttttatagtataaaatcttttagttagattggaagtttcttctttttgattataccatattctatttaaagttaactcttatattatatcataattaaacaattcttttaatacttttatagcatactcttggtttataaaataagggcttgtcgcaattgttattactttggcttttttaattaagttttttatcttgtaaaatttgagttcaaatggtatatagtccatatcacttgaaaatatatccaaatctatatcaagaacaaactctgattctacttctaaatcaaatccatacagactatctattattattaattctgaaaatatgttatattttaaagcaggttttataaaacttcccacatttaaaacttcatttgtatacctaaatacatcttttagattatttacatctacatcatagttctcaggctctctagtatccttatgttggtctacatgcactaacttgcatccttttgtaaattcaccctttaacaaagattttgcccaaaaataaaatgcatggttatgattgtcaaacacatatatctttttatttcccaggacatattcgaccatattctccaatccttttgcttttatttccttattttcatctacttcattaaataccacctcattgcctaaccttacatcatttaatgtaccatttataagttttggaacgtatatgctcttattttctcttttatcatatgaaaatacattatttcctactggtttttctatataaaatccactatattcataattttccataaaactttatttcctccattgttatataaatatataagttataattttaaaaattaaaatgcacttattgtaaatcatattatctattatagaaaacatcttatataactaaatataatatcttctctcaatatgtattatacaataagtgcaaaatatatttatataaaatatactacattcctataacaaaaccatcagcttcaattggaaggtaactaactcttctattcaactccacctttccaaaaaatactacccaatatggtctaaaaatactttcaattttaactatttcaatctctgggattcctcccataaacctatgaattaatctcatagccattttatttgcctttgcttttactcttcgttcgtccttattactatactgcacaatattacaatccacattttttacaatttcatatgtaggaaaatcttgtactatactaccagaacctgtagaaccattcactaaaatttttaattcatttatatcattagaatatctcctattcttgaaaatggatttcgttttgtgaattttaagtgtgataattttaaactctatataatgaagtctaacttcatgagcatatttgttctttaatattagcttactaaataaagaatttttcccacttttagctatctctatagcttcttcttttgtaattcttataggtaacgctcttatatccataaaatcattctctttcttatttttttcttgtcatttttaaaactctatatatataatcaaaaaatattacaattacaactgccataactccatatggaattatttttccaactataatatcatttctagtcaatataccataaaatataaatcctgttattaaaaagtacaataatactagaaaaccgtctactccaagccattttatttctaaatctttttttaccttagacactaatttagacatagcagtttctccttttatagattattttgtgtatttaaattttcacctattctattaccaatcatccatgcaataaatgaaaaaggtatagctatcacaagaggctctaactcaaagctctgaactggaaatattttaaaataaccaaaagtcactccacctacaatcattcctaaaataccacccatagatgttcttcttccatttccaagaagcccacctactataggtacaaatgccgaacccatccaaatacttcctacaaatatacatgcatcatatacattttcaaatctaaatgctacgctaagccccataactgctgctaaacatacacctattctagtaaactttactaattgtttctgagataactctttttttgtaattcttccatatatatcatttgctaatgtagctccagctgctagataatagctatccaatgttgatattatagaacctaaaattcctattataaatattactcttattccttgtggtaatgtatctaaaactaaagttatatatccagcggctggagccatctctggataagtagctcttactataagtcctgttatagttaacaccatgtcaaaacatatccatagtgaaaaacaagttaataaggctcttcttccaaccttaggagaatctgctgctgaaaatctttgataaaaagttgggtctgaataagctccaaaagaatatacaattaacatcaatgctttcatagctgacataccttttgtagggtgcataagctgtggtgcatctttgagtgcttctgtgagaccttgaaatcctcctatttgttcaaattgacctggcataaccatagttaaaccaaataccatacaaaaaaacaataccatatctgtaatggcaactcccataagcccaccaagtactgtaagtacaacgactactcctaccattattaatcctattaattctttatctattttccatgctacgttacctatagttcccatagcagttatttctccaagttgtgcacaatatataaacatcaaaattgccccaattatagcaacatgcttaccataaaaactttccagtaaatcaggaactgttatattggttcttatatgaatccttggaccaacccacaatgctaaaggcattctcccaatatgtgcagctattgaccaaactgcccatgcagatattccatatatagccgcatactctacactacctactgtaccaactcctccataccatgatgcaaccaaagttcctactattaaggaccatggtaaacttcgatttcctaggtaataactttccatatcttttacatttctagaaaaataataacctattcctaataatataaatgcaaatataactataatcccattttcccaaaatgttaacatatctaatctccacattcttatattttaatttttaactttaatatctaaatatgaacaactctacccatttccataaaaataggtagagttatataataattataagtatttaagtaatcttgttattaagcaattttattgtttaaacctttattttctcttttatttattttatttaaagcataagtagcaaatatccctataactgcacatactacagataaaataaatatatatgtatatcctgtttgtccatatttatctaaccaattacctgcaatagtgtaataaaacgcatctggagaaaatcctataaatgaagcaaatccaactactgctcctgtagtttctaaagatatattagactctgaaacagatgcaaagtatatacctctaaatccaaataaaattacacttagtattatcatgtttattacagctatccatataaatcctgtactcttaggaataaccaagtaagcagctgtacttactgtcattaatataaatcctacaaacattactcttatagatgaaccaactttatctgttataacaccagcaactggagatgctcccatttttataacataagttcttattattgataaagcagaaactagagtcattggcattacataaacttctgataagtatggacttaaataagttaaacttgagaatactaaataagttgaaaatattataagaccaattaaccaagcctttggcattgtaactacttttaacaatgacttaatacttaatccttcatctgatgctccactatcttttttctcttccactaagaaaaatagaagtataccacatattatagatgctgcagaatataaccatactacatatttgaatcctactgttatttcagcaaatttaccaaagaagtaaagacctataaaagaaattaacgtacctgatacacctgataacccttcataaaaaccaaatattcttccttgttctgactcacttccttgcattctaacaaccttaacagatgctgagaagaaagttaatattgttgtaaatccccataatacaaatattaagagtatcatactatatgatgggaatgtagagaaataaaaaccaagtactcctgaagcaattaaagaaaaagttatcagctttctaaccgagaatctatctgcaaaccatcctcctataaaataagataccattcctactaatccatataaactcaataagttccctatttgtgtatggctcaatgataaagcttgttgcattgggtcataaaatgatgatttcatatatggtaaactatacatagccgttgttccaaatgccaatatgaatattatcaagaatcttttaaaattacttttgttctccattaattttctctccttaaaattttattgtttataatctcattcatgtaattttattttaatttttttattgcttgtttaaagtcatttattatatcatttgaagattctaatcctacagctattcttattagattttctccattcatttgaactaatgtatgctcttcccctaagcttgttgctattgttgcaagctctaaagagttcattaattttctactagcttggtctcttgtcaatccattgataccatccttaagtttaaatgaaactacacctccacctaaaccattcatttgagttttacaaagctcatattgaggatgagattttaatgctggatactttaccaattccacattctcttcttcctctaaaaactctgctactgctaatccattttcacaatgctttttcatcctcatatctaacgttttcatacctcttaaaatcatccatgcactcattggtggtaaagatgctcctgtaaaacaacataaacttggccatctaactaaatctattaattcttttgaacctgctactgctccccctaaagtatccccatgtccatttataaacttagtaagactatgtattactaaatctgcacctaaatctattggtctttgtacaattggtgtcccaaaagtactatcaactatagctaagcttttattttcatgagcaatttctgctattgtttttatatctactaagtctaatgatggatttaaaggactttctatataaactattttagtatttggtctcattgcttcttttacattttgtggatttactgcatctacaaatgtaacttcaactccaaatttagataacaactcagacatgaataatttagtgtgtgaaaatattccatctgaactaactatatggtcaccactttttaccaatgctaatatagtagatgttattgcccccatccctgatgtactagatatggcactttctgcattttcaagcatagccaacttagcttctaactctgtaagagtaggattacactctcttgtatacacatatccccatgtcatacacaactcttcaaaatgctctactgtctttgcagcaaatgttgctgtttgacatattggtgtagccaatgcacctgttgttgggtctgcactatgtccccaatgtattatttttgtctctaaatcttgattaatattgttactcattttgatttcctcccattttgacttatttatacaacgttttccctgccaaatttaatcaatttagcttagtcttaatacattttttcaagtatacttttttatttgttataatttctaaaaatatgacacttattttgtttttttacagttctaattataaactctatagtaactatagagtcaatatgtttttgatattttttttacaatgtttaaaatagtcagtacaaaaataggtatatcttagaataactaaagtcatcctaagatatacctatttttatatcacaatataaataattacatataagcattagtttttttatcataaatagatttttcaagatttatcatcttttcataaatatattatagttaaatattttaatattacctaacatctacaataaaatatactcttaaaataaaattatataattaaaaatactctataaaagctaaaaagttttctattcgctacatctaaaaataattagatagaggtataaatgtatttagtttatttatacctctagtcttttataaattatatctctactaaattgattttttagcacgaataagtgtgctcttggagataccagtcatcttcacaacctctctatatggcttagaatttaataaccccaatgcatattgtatctgttgattgctgtatttctttggcctaccatctttaaagtcctttttctttttagcaaattcttttcctaattgagtacgttctattatcatatttctctcaagctctgcaactgcaagtaatgtagtcaaaaagaatttacccattgaagtattttctaaaagacctatatttaaaatatgaacacttacttctttagcaaataaaccttctattagttgtatcccttctgatgtacttctagctagtctatccagcttagttgcaacaagtaagtctcccttttttagagatgatataattttttcaaatttaggcctgtttgtagtagtgcctgtataagtttcctttattattttagcatcattatatttattcaaaatttcttgctgttgctgatacaaactgttgttgtctgtttgattttttgtacttacacggcaatatccatatataataatcatcacttcctaacataaagattttgtacagaagttacccagaagcttgtttttacttatctttatccattttactaaaacgatttttgggtgtcaatactgttaacttttgacaccataataattcctttataatttgtttgactatgtcaaaaattaccaatataatgaaattaatgagtttatacaaattggaggaaataatatgaatagtctgttaaaagaagcaatagatgaattaaaaaacatccattgcggggaagtttttttattaaaagaattgttcaaaggctatgaatggaacaggttggagatgaatattagattgaaattaggaaaactttttttgtatgaagtggtaactaatcccaatttaaatgtagaggtcatcaataaaaattctgcttatcagcaaatgtataaaaaaaaatagtgacttaaatgtatataatagtataatcttcttattgattcaaaagttaaaacttttaatacaaaacaatcattctattttaacatttatcaatatgtctaaatttatataattaacacatacgaatagtattgtttaaatcacattatttaagatagataaatcttaaccctactccagcataaatactaaaatagggcttagaattatctatatttttatcccataaaatgcttagctcttcctcttgattgaacatatatatctggggaaatacaatagaagcgtaaatttataaaatttccaaagtcagaaaacttcagttcaaacttaggtataccaaaactttcaggtgctatttcatcaacgccaaaatagatgataattccattatctgtaatataaaatgcttggtcttcaggtataactaactcaacattagaataatacatttctctattttcatttatttgagatttaatgtaatcagtaattatattaatataatcaactccatctctaaaaatgtcattaagtaaaagttcttttccagttgtcaaatctatattgtaattattcaatgtattgtatttaggcccatagttattagcaaaccccataaggtttaatatcatactcagtacataatttttattaaaagtaactgcgtaactggtagatacccaatagctttgttttggaagtgaattttgagaagctgcgttattatattctcgttcttcttcctgtaagccatttttaaaattatttacagtcattcttacagcattgtttatgttatttaaaataactgggtttacatacgtggattgatttctaatattgtatataacaggatactttacatcatatgaaaaatacttacttctttcaaaatcttcattaaattgtacatataatatattatatgtacaggtatttgtagattgataattttccattaaaatcctcccccttttataaaaaaatcagatacaatataatatgcttaaaacagtaataatgttaatagtaaatgtaaagaatagaaagtatctaaaacagcaaaaaatgactaattttgtggtataatacataggattgagagttattttataggaggaaaaatatgttattattagcagataaatggaaagattatgaacttatagatatgggaaatggagaaaaattagaacgttggggaagttatgtacttagaagaccagacccacaggttgtatggccaatggaatctgaatgggctttatggaaaaaccctcatggacattatcacagaagcaataaaggtggaggtcaatgggaacacaaaaaaagatatccagaacaatggactataaattataaaaacttaaagtttcacattaaaccaactggctttaaacatactggattattcccagagcaagcagctaactgggattggatgatagagaaaataaagaaagctaacagacctataaaagtgttgaatctttttgcatatacaggtggagctactgtagcatgtgcatctgctggtgcagaagtatgtcatgttgatgctgcaaaaggtatggttaattgggcaaaagaaaatatagaattatcaggtcttaaaaatcaaacagtaagatttatagtggatgatgttgtaaagtttgttgaaagagaaataagaagaggtaaaaaatatgatgcaataataatggaccctccttcttatggaagaggtcctaaaggagaagtatggcaaatagaagaaaagttatacagttttgtagatttatgtatgggagttttatcagataaccctttatttttcttaattaattcttatacaacaggattttctccaatagttcttgaaaatgtattgtctacaacaataggtaaaaagacaaatacaggagatatatacggtggggaattaggaataccagcttccagagatggtaagatacttccttgtggtatatttggaagatgggagaaaaaataatgataaaagtcatatatgaagataaccatttattagttgtagaaaaaccagttaacatattgtctcaaggagataatactaatgataaagatatggtaaatcttttaaaagactatattaaaaaaaagtataacaaacctggaaatgtatatattggtttaatacatagattggatagaccagtaggtggagttatggtgtttgcaaaaacatcaaaagcagcatctagattgtctgagcaggtaagaagtaagactttcaaaaaaacttatctagctgttgttcatggcaagataaaatctaactcagatatactaaaagattttttatataaaaataaaaaaactaatatggtaactgtagtgaaaaaaagccataaagatgccaaagaagctgaacttaactataatgtattagattttaaagaaaatctaagtttagttcaagttaatttaaagactggtcgttctcatcaaataagagttcaatttgcaagcagaaaacatccattatacggagaccaaagatatggcaaagaaataaataagattggacaacaaatatctctttggtccaataagatagaaatttgccatcctactacaaaagaaaaaatggaatttacatgtcatccacctgacaaatatccatggaatatattttaaatctcaaatgaggtgattatatgagtaaaaaattttcaataggagaaatgtctaaacttcataaaataagcatacagacactaaggtactatgaccaaatagatttatttaaacctgttcatgttgaccaagaaagcaattacagatattactcaattgaccaattttcacaattagatattataaaatatttaaaatatttaggtatgcctttaaaagaaattaagtcaaagcttgatgaaaataatgaagaaattctaaaattactaacaaataaaattaatatagtggatgaaaaaattaaagaattagagcttataaagaaggtactaagcacaaagaaagaaactatggaaaaaggtatgaaagtagatgaagttggtaaaatagtgagaaaacatattccacgaagaagtatcttatctatagagtatgaagaaggattaagtagtgaagaaactatggaactttccagaagacaaatagcaaatatattagaagataatatatctgtgttctatggtggagtaagtggacttgtatctatagataaatttttaaaagaagataaagttatttatgacaatagttttgttactgttgaaagagacttatttgatataaaatcacaaaaacatataacagaaatttcatctggtgattttatttgtatgacatataaagggtcttacaaagaaaattataccgcttttaagaaactggttgattatgttgaatataaaagaatacctattgaaaattatatatatgaaatacctataatagaccctctgtctacaaacaacgaagaggaacttctaacagaaattcaaatacaagttaaaaagagagaaattgacttaagatgtctagtgtagtaatctagtttacttacacatcttaatatagttgtctattatcaacatatgatttttctagatagtgattcctaacagtgagattttcaaaaaataggaggaaatatggctaatgctaattccctcctatttttaattaatccatatcattttaattaagccatgtcatcacgaagtgcatcaataatattttctttttttatcttattaatagtatacaacattgtaataaatactataaataaaacactaaatatactaattccaatactaaaccatggaatcacaaaatcaatatcatctgtaaccattactttatgaattagccatgaagaaattactgctataggaagtccaaagaacaatgctctcatgccataaaaagcacactcaaaattcatcatcttttggaaatcatgctcagacattcctacagagcgaagcatggcaagttctctacgacgtaacttaatattagttgaaattgtattaaacacattggcaatcgaaatcagagaaatcataattatgaaagtataggcaaaaacattggcaataaaaatgtaattacggttctcatccatcattccatacatattgtacagattgtactcattagtaactccctcactctcaataatttgctccatttctgcaactgactgagtaggatttttcgattgaaagcttaaactttcaattcctgtagaaacaccaggaatctcaaacttatctttggctgaataaggagccaatactctgaagcttgctttcttcacatctgaacttctgattcctggaggagaatcaggtggcactactttgacaaatgaaatattcacattttgtctctcaggtatctccaacttgccattagtttcaggagtgagactaacattcatagaagaactgttgaaaatatcaataatattattatcctttgttaccatagaaacagcaatcagttttgcattttgtccagtatattcttctgctggtaatccaagacttttaataatattcagataagttctatcatcaagaaattgcatatctactggtaattcaagcatttcactcatagaatgtgaaccctcatagttcaaataatcgtctgtaagctcacttactttggcaacacatgaataggtcataagtttctgatacaaaccttcgtaaacaccatttgcagtttttagcttatcgtaaagcttcaacatttcgttgtctttcataccttgtgtagaaaaaataatatcctgatcagtaacctctgacctctgatttgacatctgttttaggtctgctactaaagcacttgtagatataaataaaactatgcttaaaacaagcgacaatacaatacttcgataacgtttcttgtttcttttaaagtttttcatagcaagaactccctcaagaccataaactcgctgtgttagttttgatgtcttcacagatttagattcaatttttacctcatttgtctgacgaatacactccatcactggtgtgttggcagcctttcttgctggtatgtaagcagaaattaagattgtaaccatacttaccactgctgcaacgatgattgcagggatagacaatgttaatgtcaacggaacgtttacatagagaatatttgcaaagtttttagctatgacagaaatcacaagtccaatactgactataccgattgcaacaccaattggtataccaatcgcaccaatgcaaattccttcaaatagcaccgaatttcgtaactgttttgctgtagctccaacagatgaaagtattccaaattgatgtgttcgctcgttcaatgacatgttaaatgaattatatattagaaaaattgagcctagcatgattatggcaagcacaatgccaccaaccgagtacaaaaacatattgaacaaattgttatcagaaacacctatgaagcgcaacacattgtcattgaaaatggaagcatggtctttagtgctacttgtgtaagagcgaatctgatgtggatttttcaatgtgacaaaaaggctaagactgtcagtcttgacttgtttatcttctttggttatcaaggtatatcctggtgcagaagattcttcaaatacgggctttctacagatacccacaactgtataagttttcttatcctgtggcacaaaaacttcactcccagcagtgtaggggtcactctgaccaagcttttcattttcactcattcgtttccctacatccaaagaaatagtatcacctactgcaaatttgacaccaccatctgtcgcaactttacttgaaacaagaatctctctactattttcaggtaatcttccagaaattaaagttataggcaaagtatcaaaagcttctttgctaaatccagcaataaaaagatatggtttatctggatttctgttaccttcaagtgttgcatagccaatattttcaaatgttgcagtatttgcaacttcatcattgactctttgttcctgtacaaaagaagaatccacatccaaaaactggacatgccaatcaccatattttataatagctccatttgtcatatagttcatcaaagaaactccaaaggtagtaactgctgtaatcatagcagctgacagaacaactcctataattgttacaagagttcgagtgcgattctttttcaatccttgcagagcaactttgttaaaaatgttcattaacgattcaccttcctctcatcacgcaccacttttccatctgaaatacagataattctatctgcctgtaaagcaatgttttcatcatgtgtgacaataatgagagtttggtgatatttactatggctctctttcagtaactggataatctcttgtccatttttactgtctaagctacctgtaggctcatcagcaagcataactgctggtgcattcatcaatgcacgaccaatggcaacacgttgctgttggcccccagaaagttgatttggtaaatgtgtttttcgttcttttaaaccaagtaattctaacaagtcatttaaccgttcttgattgaccttacgcttatccataagtataggcaatgtgatattttccactacatttaatgtgggtatcagattgtgaaactgataaatcaatccaacttgtcgcctacgaaaaatagcaagtttttcattgctttggccatatacatcttgcccctccagatatatctttccacttgttggtacgtctactcctgcaatggaatgtagtagtgtagatttaccagaaccagaagaaccaatgattgcagtaaactcccctttttcaatagtaagtgagacatggtcaagtgcagtaaccttattttcattcttaccataaaccttacataaatcttcaatctttaaaaacgccattatataagtctcctttcatattttataaatatatcatagaactttcaacttacatttaagtgacatttaaatgagagattcgtcactttggaaaacgaataacaaatattgcaccaccttgtgggtgattttgtgcagtaattgttcctccttgtctcataataatcgtcttacaaagtgccaatcctattccataaccagctgtgcttgaatttttcccacgataaaatctgttaaatagacatggtaagtcttcttttttaaagcctgctccgttgtcatgaatagtaagttgagtaaacaaaaagttgtcctcacaaacgatatcaatttttccattatcacccacactctccatgcagtttttaaatatattttgaattgcttctgaaagccaatttaaatcacccaaaatccttactccttttggtatatcaatatgtaaagtgatattgtgcagttccatgggaatcaaaagttgatgaagtgcagaactaatcaaattattcacatcaatttgttctttttgaaagactacaatacctgcatctaaacgtgataattttaaaagggaagtaatcagccagtccattcgtataagtaattcctctgtttctcgtatcaactcttttctctcatcttcatcagaagtattctctaacagtgacaaaataagagttactgatgtaagaggagtgcgaagctggtgggctatgtcagctagtgagtcagcaaggtgttctttttcttttttcagtgcgtaattttgctctctaatacgtaacgtcattttagttatttcactttgtagaatagaaagctcaccctcatctgattcagcaatatacagatggttagcattatgaagcacaagattaatttgttctgaaatctgtgcaatacttttgtatcgatttttagtaaacacaaaaaatgctattccaaaggtagtggcagaaacaatagaaagtattccagtcataatactgattgcaaatcccagggctacagtgagaatagtaattaataagaataaaatagcaaattttcgaaactctctatttcgaaacataacttccccccaatctataccctgtcccacgaacagtcaaaattatttgtggacttgaagggtcatcttctatcttctctcgcaagcgtttgatgtacacagtcaatgtgttgtcattaacaaactcacctgccgcatcccacaattcatcaagtaatcttaccctcgtaataatacttttaggattgctaataaacaccaataacaaacggtattctaaagctgaaagaaaaacctcattgccattctttttcacaacaccggttgccgtatctacataaagcccacaaatttcaaaagttgacccaaaacgcccactttttcgtagtgctgttctaattcgcgcaatcagttcacgtggacgaaaaggtttagtaatatagtcatctgcacccatattcagtccagtaacaacacttgattcatcaccagaagccgtcaaaaagataacaggaatgtcttgcttttctttgatttctgtgcaaatcgtaaacccatttccatcaggtaaagaaatatcaataagtgccaaatcaaatttattcttagcaatctctacaagtgcttcacttcttgtggatacatgggttactataaatccttctgaattaagcaaaagaataagatttttggcaattgctttatcatcctcaactaaaaatatccgtttcatttactttcatcctcctttattttattagttttatatattccagcagagcaatagtacactactattttacttatcattacacaattttcagtagtttcttttgttcttatataatccatgcataatacctccattgatttattatatttcttataacataaatacacaagataagacaaaaaacataatgtaagtgcaagttttttaactcactaacttataaacatacactcctactaacactactttcttgatgacacatcttacaagcttatattcatacatcaatgaaaaattaaatttatccatttattaaaataaaaggcaatagcttctatagctaatgccctttatcttaaaatgatttaaatactatacaatttttataaatggctataaataaactcgtatagaatataaaatttatctacagtcttttgttatacaaaatttataacctcttatagaacaaatttaccactttgtaaacttatcacttttactcagctatattataaacttttaatttatctttgtttaaatgtttcttcttaacttctactaaagcttttagcgtatccaaagatgtcattatttcagtagaaaattcaatggctgttcttctcatcttaaatccatctcttgtagagtcatttcctttagttggtgtatttattactatatcaacttgtttatttcttatagcatctaatatgtttggtctaggctcttcaattcgatttactatatcagcctctattccattttctcttaaactcttcgctgttccttctgtagcaacaaaagtatatcctaattctttcatatcttttgctatctctataaactcatctttatcatgattatttacagtagcaagtactactcctctttcatcagacatatgtctacctgctgccaagaaccctttatataaggcttcttctaaattttctcctacacctaggacttctcctgtagacttcatttcaggtcctagacttacttcaactttagataatttagacattgagaatactggtacttttactgatactaattttggctctttgtaaactcctgtaccatatcctaaatcctttaatttagctcctaacatacacttagtagccaagtcaactattggtactccacttactttacttatatatggaactgttctactagctctagggttaacctcaattatatataattcattttgaaattctataaattgtatattaaccataccaagcacattaaggtctaaagctatttttttagtgtattctactatcttttcttttatttcatcagatatattttgacttggatacattgttgtactatctccagagtgaactccagctctttctaaatgttccattataccaggtatcaatatatcttccttatcacatatagcatctacttctatttctctaccagttagatatttatctataagtactggatttttatggtctctatcaaatgcatcatccaaatactgaattagtttttcttcgttataagttatttccataccttgaccaccaagtacataagatggtctaactaatactggataacctaactccttagcaatttcaacaccttcattagttgtccatacaccttttccttttggtctatttatatctagtctctctagtaaatcatcaaatttttctctatcttctgctgcatctatatctctaaagtctgttcccagtataggtatatttttttcatgtaaaaacttagccaattttatagctgtttgtccaccaaactgtagtattacaccttctggtttttctttttctattatatttaaaacttcttcttctgttaatggttcaaaatacaacttatcagatgtatcaaaatccgtacttacagtttcagggttattgtttacaattatagtttctattcccatttttcttaaagattttacacagtgaactgaacaatagtcaaattctataccttgacctattcttattggaccagaacccaatactacaacttttctcttatcactaactactacctcatcatattgttcataagttgaatagtaataaggtgatagagcttcaaattctcctccacatgtatcaaccattttataaactggttgtatattatataaacttctcaattcatataatttttctgggcttatcttcattaagtcagatatacctttatcagaaaatccctttttctttaattcatgtaaatattctttatctaagtcttctatttttagaacttttaacttttcttcttgttctactatccatttaaatttatttataaaccacttatcaacaccagttatttctgatatcatttctactttatagcctcttcttatcatttcagctaagtcaaatagtctctcatcatcaggtactactactctagcctttaattcttctaatgttctaccttctgatggagcatgaaccaatgaatattttcctgtttcaagtgatcttatccctttaagaatagcagcctcaaagttacttcctatactcatgatttcaccagttgccatcatcttagttcctaattttctatttgcatgtctaaatttatcaaatggccactttggtatttttactaccacataatctaatgttggctcaaaacaagcataagtttttttagttactgcattttctatctcatccaaagtataacctaaagctatcttagctgctacttttgctattgggtatcctgtagcttttgatgctagggctgatgacctactaactcttgggtttatttctattatcgcatattctaaactatgtgggtttaaagctatttgaacgttacatccaccttgaacctctattgcatttattatgtctattgatgcctttctaagtagttgatactcttcatcacttagagtttgacttggagcaacaactatactgtctcctgtatgaactccaactgggtctacattttccatattacatacagttatacagtttccatttccatctctcattacttcatattctatttctttccaaccttttatactcttttcaagaagaacttgtccaacaggacttagctgtagtccatgtgaaagtatttctcttaattcttcctcagtatcagctatacctccaccagttccacctagcgtatatgctggtcttacaactactggatatcctatcttattggcaaactcaagacctgcttctaaatttgtaactatatcactaactattactggttgatttatttctttcattacttctctaaataaatctctatcttcgcccttttttatagattctatagatgttcctataacttttacattatatttatctaatataccagcatcatgtaattctacagctaagtttaatcctgtctgaccacccatacctgcaagtaaactgtctggtctttctttttctattattttttctataaattctattgttaatggttctatatatattttatctgcaatttctttatcagtcattatagtagctgggttactatttactaatacaacttcaattccctcttcttttaatgcttggcaggcctgtgttcctgaatagtcaaactctgcagcttgacctattattattggccctgaccctaatactaaagttttctttatactatctaatttaggcataactctttctccttatctaaacaattttcacagttcttatcttcatcatctatacaatcaactttaattactttattttatcttaagttcaaatttactcatcaatacatctatttaatacatctatgttaattaaaccaaactttttgatttaagttattcttgttttttagttagctattctaatgttatttattttactaattctaaaaatttatcaaaaatatagtcattatcttttggtcctgggcaagcttcaggatggtattgaacactgtatacatctagcttctcatgtctcattccttcaacagtattatcatttaaatttatatgtgtcactttcatttgttcaggaacttctgaaacataataaccatgattttgagaagttataaatacttttccttcttctaaatctttaactggatgatttccacctctatgcccaaatttaagtttagcagtttttcctccaagagctaaagctaaaagttgatgtcctaagcatattccaactataggttttttaccaataagagcttttatattttctataacatcttctaggtcttctgggtctccaggtccatttgacaagaatattaagtcagggtttatactcaatacatcttctggagatgttgtagctggaaatattgttatatcacatccacgagctataaatgatcttaatatatttctttttactccaaaatccataacagccacttttggaccatttccttttatatgctctacttcttttcttgtaacagttctaactgcttctgtatttgaaaacttatccaatttatgtttaacatcttctaatttactgtcttctaatgtaattatacctttcattgttccattatttctaagtatcttagtcaaagctcttgtatctattccttcaagtccgataactttattttgctttaaatattggtctatatcaatttcacatctaaaattacttggagaatcacttttctcccttactatgaatccctttacttgaactttttcagactctgctgatgataaatttataccataatttcctacaagaggataagtcatagtaactatttgaccatagtaagaagggtctgttaaaacttcaccatatcctatcatcgaagtattaaatactacttctcctacactttcttctaaatatccaaatgcctttcctataaaaactgttccatcttctaatattaaccttgctttcatactacagtacctcctataattctctttagacaaactaaagaacattaactaaatataagcttttaaatatctatatctatttttcacttttacattctagttttatacttatttacatttattttttatctttttctattatactacaaatttcttaaaaaaaagaagttatctcaaaagtaaaaactcctagaaaaaataacctctttttttttatttaataattaaattcttaaactatacaatcaacttaatttctattcagctatattgtaaacttttaactcatctttatttaaatgtttcttcttaacttctactaaagcttttagtgtatccaaagatgtcattatttcagtagaaaattcaatagctgttcttcttatcttaaatccatctcttgtagagtcatttcctttagttggtgtatttattactatatcaacttgtttatttcttatagcatctaatatgtttggtctagattcttctactctatttactatatcagcctctattccattttctcttaaactcttcgctgttccttctgtagcaacaaaagtatatcctaattctttcatatcttttgctatctctataaactcatctttatcatgattatttacagtagcaagtactactcctctttcatcagacatatgtctacctgctgccaagaaccctttatataaggcttcttctaaattttctcctacacctaggacttctcctgtagacttcatttcaggtcctagacttacttcaactttagataatttagacattgagaatactggtacttttactgatactaattttggctctttgtaaactcctgtaccatatcctaaatcctttaatttagctcctaacatacacttagtagccaagtcaactattggtactccacttactttacttatatatggaactgttctactagctctagggttaacctcaattatatataattcattttgaaattctataaattgtatattaaccataccaagcacattaaggtctaaagctatttttttagtgtattctactatcttttcttttatttcatcagatatattttgacttggatacattgttgtactatctccagagtgaactccagctctttctaaatgttccattataccaggtatcaatatatcttccttatcacatatagcatctacttctatttctctaccagttagatatttatctataagtactggatttttatggtctctatcaaatgcatcttgtagatattgagataatttttcttcgttataagttatttccataccttgaccaccaagtacataagatggtctaactaatactggataacctaattcattagcaacttcaataccttcgttaagtgaccatacaccctttccttttggtctatttatatctagtctctctagtaaatcatcaaatttttctctatcttctgctgcatctatatcatcaaaatctgttcccagtataggtatatttttttcatgtaaaaacttagccaattttatagctgtttgcccaccaaactgtagtattacaccttctggcttttctttttctattatacttaaaacttcttcttctgttaatggttcaaaatacagcttatctgatgtatcaaagtctgtacttacagtttcagggttattgtttatgattatagtttctatgtccatttttcttaaagattttacacaatgaactgaacaatagtcaaattctataccttgacctattcttattggaccagaacctaatactatcacctttttcttatcactaacaactacctcatcatattgctcataagttgaataatagtaaggagatatagcatctatctcacctgcacaagtatcaaccattttatatgctggtttgatattgtatagacttctcaattcatataatttttctggacttatcttcattaagtcagatatacctttatcagagaatccctttttctttaattcaagaagatagtctttagttaaatcttcaattttcataacttttaatttttcttcttgctctactatccatttaaatttatttataaaccatttatctatacctgtaatttgttctatcatctctactttatagcctcttcttatcatttcagctaagtcaaatagtctctcatcatcaggtactacaactcttttctttaattcctcaatgcttctctcctcagatggtgtgtgaactaatgaatattttcctgtttcaagtgatcttatccctttaagaatagcagcctcaaagttacttcctatactcataatttcaccagttgccatcatcttagttcctaattttctatttgcttttttaaatttatcaaaaggccattttggtatttttgccaccacataatctatagttggttcaaaacaagcataagtttttttagttactgcattttctatctcatctaaagtataacctaaagctatttttgatgaaactttagctattggatatcctgtagcttttgatgctaaagctgatgatctactaactcttggatttatctctataactgcatattcaaaactatgtggattaagtgcaaattgaacgttacaaccaccttgaacttctactgcatttaatatatctaaagatgcttttttaagcattgcacattctttgttacttaaagtttgagttggagcaacaactatactgtctcctgtatgaactccgactgggtctatattttccatgttacatacaactatacaatttccctttgaatctcttattacctcatattctatttctttccaaccttttatactcttttcaattaatacttgtccaacaggacttaattgtagaccatgtgaaagtatttctcttaattcttcctcattatcagctataccaccaccagttccacctagtgtgtatgctggtcttacaactactggataaccaattgtaagtgcataatcaagacctgcttgtaaatctgtaactatatcactaactattacaggctgatttatttctttcattacttctctaaatatatctctatcttcaccttttttgatagattctactgaagtacctattatctttactccatatttatctagtatgcctttttcataaagttcaactgctaggtttagccctgtttgtccacccatacctgcaagtaaactgtctggtctttctttttctattattttttctataaattctattgttaatggttctatatatattttatctgccacttctttatcagtcattatagtggctggattactatttattaatacaacttcaatcccttcctctttcaaagactggcaagcttgtgttcctgaatagtcaaactctgcagcttgacctattattattggtcctgaccctaatactaaagttttctttatactatctaatttaggcataaatttttctccttatctaaatggtttttactatctgtaaataatactaaatctatattaatgctaagaatttattaaatatacaatctaaatcttcttttgttgtgtattctggaatgtactgaacactatatattggtaattccttatgtctcattccttctatagtattgtcatttaaatttatgtgagttacctctgtattttctggcatttctgaaacattatatccatgattttgagaagttataaatacctttccagtttctaaacatttaactgggtgattacctcctctatgtccaaatacaagctttgaagtctttcctcctaatgccaatgctaaaatttgatgtcctaaacctattcctgtcaatggctttttgcctattaatttttttatattttcaactatatcatttatatcctctggatttcctggtccattagataataagattaagtcaggatttatatttaaaatttcttctactgtagtcattgctggtgctatagttatatcacagttacaagctttaagagactctagtacactatttttaacaccaaagtctataactacaactttagctccagtaccttttatattttcaatttcttttcttgtaacattttttactgaatctttgttacaatgctcttctaatttagactgaacatcttgtaatgatacattttctaaagttataattcctctcttagttccattgtttctaataattttagttaatgctcttgtatctattccttcaagtcctattaccttattttgctttagatatgtgtctatatccatttcacatctaaaattatttgggttatcacttttttctcttacaataagtccttttacttgcaccttatttgattcaacatcttctaaatttattccatagtttcctataagtggataagtcatagtaactatttgtccataataagttgcgtctgtcaatatttctccatacccagccattgaagtattaaatacaacttctccaatagcttcctttagatatccaaatgcttttccttcaaatactgttccatcttctaaaattaatttccccttcatataagctacctcccaaatattttatctaagcattttctatttctcttacaatattaatagctgattctcttggattttctgcttttgttataggtcttccaacaactaaataatgagcacctttttttattgcatctgatggagttacaactcttttttggtctccaacctctgctgatttaggtcttattcctgggcaaactgttataaaatcagctccacatgcttctactattttatctacttcttgcgctgaacaaacaaccccatctatgcctgattcttttgccagtttagctctctttatagctaactcttctgttgtcatattacatcctatgtcctgtaaatcttggttacttaatgaagttaaaactgttactccaactactaatggcttttctatatttaatctttctgcttcttccctagcaattagtgcacattgtctcattccttccatatctgatacatgtattgtcattaaccaaacattatctctcactgcagctctcactgcacttttcatagtatttggtatatcatggaatttaaggtctaaaaatatttttttccctttttctttaagataatctattgttttaccttttgtggcaacgtattgctctagacctaccttaaatatgtctacactatcttctaatctgtctattagttctttagctttatcaaattcgtcagtatcaattgcaactatcaatttttctttaccatttatcatttttacatctcctttttaataaagcctaaataatcataaaaaaatcctcacaccaaaagaggcataaggattttatctatacataactccattcattagctatgagatatctttcccagtctctctggactagtttaaaagactttattatatttaaatttttattttatactcatcaaaaacctctagaagatttactagaggttatatactaacattatctataaccctttagtctctctggactactttaaggaatttagctgtaatatttttctttatttatataactttatgtatctataggataatttaaagttttatcttttttataattaaaccactaattgctttttatgtcaataagtctttgaattattcttcatctttatcaaacaattttttctcaaaatatgattctgcattatatattgcagcaactggattatgcccagttactctatctttgacaactaaagttgttataggagcttccatatatttcatggctaaagtatcgtgaccaacacataatccaagaattacattaaggtcaaccttagcttcatttaaaaataaagcttgtcctattggattgcacattacctcatctgaacactttgatattgtttgagatgcttctagtccaattgtactcttaggcattgccccatttttacatataacagaaaatacttcaaacccatgatgttcaaatattttttgtgctgtttgcatttctctttttagtccaatacaaaatgctatgccaatctttttataaccacactttttagcaaactctataatctcttttagtctagtatattgacaatacccctctgcttcaactaatccagcattataagctatttttctattctcttcttcttcataaagttgctttgctttttgttgtagttcaatttctctagttggacatatcttcattaatttatccatatttccattagaacagcctctaagattacattttccacacttatacatatccaatatccccttccaaaattttattcatcttgtgattcttctttttctagagttacattttcttcttgggtttcttcttctggtttcacatgctcgactacagttataaaatatgattttcctattttattccttataggaagtttttcatatgaaacatctattttattttttatacaagctatatcaaaatgtcttaaggctacacctaagctaaccttattcatatcttcacagtgtttcttaggtctcttttcaaataaatgaagacctcgttcatccttatggaaataccacggttgagaattttttacagatggagctcttcttgtcaattctaagatatctttccactttctattcctatttatcttatttatcatatcttttactggctttctatcaggtctagcatatctcgtcctaaacaactcttcattttttgctggatatccaaatgctattattatataaggattttctattttgttttcatcatcttcttctgtttttactccagctagataatctaaatcatcttcctcatcttcttcaaaattcttattcccaatatctacaaattccaagatatcttctctctttaagtttccttccaaccagcaagtagctattcccaatgttgtaaggcgcaaaactacaccttctgtagcaaatcctatattctgtaaatagtcctcacctttgtctgatgtaactactatataatgaggtgcctttactttacattccttacccatcaaaaaatgtattatatgacctctatcaacaacatgtgctttaatatttaaatcttcatttaagtattctaaatttttacaacttctttttatttcttccatcaatggcttttttatcttcttactggaaaaatttcttacagattttctataaaaaatggcttcataaagctccatttatgccctcctaactgaaatcttctgacgtataaactctataaatttatataaatactttatattttttatagttttatttcctttttcctcctgccctattttgaaattcataagaatatctactctagtttaatatagcattcaaaaggcttaaattctaccttatcaatgtctatacattagcataatttttttatttgattttctatgctaatttaaataacaacactagctattacctttttaattaagctttgccagaaaaatttttttcatttataaatatctatctcattattatattataagtttttttcggtattcttgtatagcttttcactaaaaaagtatttttatttctactttaatattattatcaacaaaaaacatactgcttaaataagtttgttatcctcataatctgttttaattaaaatattttttttatttctcaatctataaagtataaatattttgaatatgacccaaaatctaagtaaagttataatattttataagttgttcaatattaaaaacataagtaatgttataatactttataagttattcaatattaaaaatataggaggataaatatgaatttaaatagaaatttagaaaaatacgctgaattagcaataaaagttggagttaacatacagccaggtcaaattctacttataaagtcaccaatagaatgtgctgattttgcaagaaatgcacttaaagaagcatataaatgtggtgctaaaaatgtttatatagagtggtctgatgaagaaagtactcttattaaatacttgtatgctccagatgaagcatttcatgagttccccaaatggacagcagaacaatatgtagatatagcaaaagaaggtggggcatttttatcagtctatgcccaaaatccagatttattaaaagatgttgaccctgaaagagttgcaaattttcagaaggcatctggaaaagctttaaaagaatggcgttcttacactctaactgataaatgtaaatggagtatagtctctgtgccaacaaaagattgggcaaaaaaagtgtttccaaatttatcagaagataaagcaatagaaaaactgtgggatgctatatttaaatgttcaagagtagatggtcaggaccctataaaagcatgggaagaacataatgaaaatcttaaatctaaaatggactttctaaataaaaataactttaaaactttaaaatataaatcctcaaaaactgatttgactctagacttgccaaagggtcatgtttggctaagtggagcatccaaagaccctaatggaataagttttaatccgaatattccaactgaagagatttttggaatgccacataagtttaaagtaaatgggactgtttatagtacaaaacctcttgtttatggtggaaacataattgacaatttcttcttaacatttaaagatggtaaaataatagatttctctgctgaaaagggattagatacactagaaaaacttattgaaacggatgaaggctctcattatttaggagaagttgctcttgttccatacaactcaccaatatccaatacggatataattttttataatactctatatgatgaaaatgcttcttgccactttgcaattggttctgcttataagacttgtctggaaggtggaaacaatttaaaagatgaagaattagatgaacatggtgtaaatgacagtttaacacatgtagattttatgattggttctgctgatatggatattattggtgagacttatgatggaaaacaaatacagatttttaaaaatggtaattgggctttttaacatatgattttaactaaaaagggctaatggaagttataccagacttcccagccctttttaatgttgatgataaatattttttatattaattaatctcattattatagattaattcctattgttttaaacataagtatctaaaacttatatttatattatatataaaatatcctatttagtaaaacctttattttaatttatatgctaaaaatttaactttgctatttcaacagcagactttgcatcctttgaataataatcagcgcccatttcttcagcgtattcttctgtcaaaactgcacctcctacaaatacctttgcatttatctcattatctctcagtgcctgaattgtatctttcatactttgaacagtcgtagtcataagtgcacttaatcctactaattttatatttctctttttagcaacttccactacttcttcaatagggacatctttacctaaatctataacctcatatccataattttctagcattatttttactatatttttcccaatatcatggatatcaccttttactgtagcaactattatttttcctttggatacattattgctacttttacttaataaagtttcctttattgtatttaatgaaacttttaccgtttctgctgattgaatcaattgtggtaaaaatatatctccgctatcatatctttttcctactttatcaagagcaggaattaaaatctcatctaatatgtaattttcatccttctcttttaaaagattcagtgttacattttttgcttcatcttttaatcctctttcaactaaaatatccaatggcaaatctttgtcaatctttgtagatgaatccgatttttttgaattatttatattactatattgatttatatagtttatacatcctttatctgtgttatttaatattttaaaagaattgatagcttccatcatactatattcatttggatttataattgctaaatcaagccctgcccctaaagctaatgttagaaaagaagcattaagtgctttcctatttggaagaccaaatgaaatatttgaaacacctaatatagtttttactcctagtgtctttaccattgttatagcttttatagtttctattgcttcttcttgttgtgctgaaacagttaatgataaacagtctataaatatatcttttggttttatcccacaagaaactgctctattgactatcctttttgctatttcaaatctttcttcagcctttttaggtatccccttttcatcaagtgtaagtccaaccacacatgaaccatactttttaactattggtaatatactttctaaagactcctctttgccatttacagagtttactattgttctaccattataatatctaagtccttgctctaaggcctctacattggaagaatcaacttgtaaaggtgtatctactactgcttgaatctctcttattaattttggcattagttttttttcatcaatctctggaagaccaacatttactccaagtatttgtgctccagcatttacttgttctaagcctaaatttatagcataatcaacattttcattttttaatgcttcttgtagagattttctacctgtgggattcaatctttctccaacaactgtaggcgattgtacttccacaaattttgatggtgaacagactacacatttatcaattttctcgatacatccctttgtaacagaatttatattctcagatatttcttttataaaacttggattcgtaccacaacatccacctattatagtagcaccaacttcaacgaactttttaaccccttcaaaaaattcttttgcatcaacatcatatatagcctctccatcaactatatttggaagacctgcatttgcttgaaccataacagggactgtagctcttgatgctattttttcaactattggtaaaagttgtttaggtcctaatgaacaattaactcctattgcatctacacctagaccttctatagtagccaccatacattctggcatacatccagtaaaacttcttccaccttcatcaaatgtcatagtacagaaaataggtaaatcagagttttcttttgctgctaatacagctactttagcttcatataaatccatcatagtctctattactattacatcaactccagatttaacgccttgtagtacttgtcttttaaatatctcatatgcattatcaaaacttaaagtacccataggctctagcatttctcctataggaccaatatctaaagctacatatcttggtttagtattatctacattttctatagcttttctagccaccaaaacagcattgtcaatcacctcttctacagtatacttactatctaattttagttcattacatccaaaagtatttgtaagaattacattcgaacctgcctctaagtatgctgtatgtatttctataagtttatctggattttgaagaccaaatacttctggattttcacctaactttaaccctttttgttgaagcattgttcccattgcaccatcaaatattaatatattatttttcagatattgtcttatttccacaagagttcgctccttttctatatgtacagtttctatagtttttacaattttcacacgacttttctttcttagatttatttattcttgtattagaaatacctataatagccactactgactttctcggtatcataattccattagaagtaattgttagacctatttgtttttgagcattcaaaacgtttaatatatctatatttttttctattggtaaatctccatatcctgggctatatcgcatagttataaatttatcttggtttaaaaaaaccttttctaaattattttgaacaatgtcacacacttcttctattgctgttgttccacatgaatcaattattagtccttttgttaaatttgaataagagtgtcgtcttatttctttttctatatctatccctatagtagctgccataattacacactcattacattcttttaaaagttcatatacatctttactctctaatgttaaatttgttccctctaattctacaacattatctttatttattctaataggataaatcctagataaatatctaggatttattttatttttagttatagctacacattcatcaatagtatatttaaggtctttatctatctcttgacctctgtattgtaaatatcttaaaacttcactttgatttatgcttatatcttctcttccaattaaattattctccatatatatttaaagaaaatcctttatctaaaacatcttttgcatattcctttgccccaaataaagataagtctctgtagtttccacattctatggctgtagctgctggcattttatctgattcaagaactttttttaatgcttcttctaaaccaatcttaactgttttggcatctacatctccccatagtattaaataaaatcctgttctacatcccattggagataagtctattacaccatctaatgtatctcttaaataagtagctaaaagatgctctaaaccgtgcatagcagcagttccaaaactttctacatttggctgtaaaaatctcaagtcaaatttagttactttatctccctttactccatcaagtacactacactttcttacaaaaggagcttttacttttgtatggtctagcttaaaactttctactttttccattatttaatcctccattatactttaaagtttgttacattaattctaaaaaaaactcttcctatctattattgataagaagagtatattatttcaagtcatctcatcgttgttagcaggaccacctgataaaaggttggtataggatcactgagctaactctctcccctaattcttgataagtatcttattaaactgacttaaattatatatcacttttttatttttgtaaacactttattgttataatatttatatcacataatcgtacttttattttataactaagctgattgtattattggcagttgtacctcaaacacagtttgatatttatcgcttgaaacagtaatttctccatcatgtaaatttacaatattttttgtaatcgcaagacccaatccagaacctccaacatttctatttctcgatttttcaactctataaaatctatcaaatatatttggtaaatctaacactggaattggttctccataatttatcacttttacaaccgccatatcttccattttctctgtgactatatctacataatgcccatcttttccatatttcacagcattagttataagattttcaaatgctcttaccaatttatttggatcagctttcacaattaatttttcttcattaaaattaattctactaaccataaattcttgtttaaaataaatttcaaattgagatactacttgacttaataactctactaaatttatttctattttgtttagttttattgtattattttgcattttagtcaattcgaacaaatcatttataagaacatttaaatttttcgatttttcatatgcaatatcaacataatacatcatctgaacttcatctttatacttaccttcttctatcactcctaaataacccattatggatgtcaaaggtgttcttaagtcatgtgacacatttgttattaaatctgtttttgtctgctgagcttgtctctcttcaatagttatatttctaagttgatggactatattattgattttatgtgctagttcatcaatatcatccttttctttatcctttaatatatctaaatcatactcaatatctatacttttttctaagttaccttcatccattaaatttacagcacttttaatgatttctaatttttgattttttctattagtctttcttataaaatctacaatttgcttatttctcttgtacgatatcatggaataaattgctaatgatgtgattgtaaataaaaatggataaaataaactctctcctataagacttctgaaatctcttaactgatatacaagttgattaattacagatatctcactattgaaatataataattttattatatacatacttgttaaaataagcattgaagttaaagcacagcttattataagatctaatatgggtcgaaacatatgatttaataaacttttatttttcaattttatatcctactccccatacagtatgaattattttttctccatctgtatatttttcaattttatcccttattctgctcatatgaaccattacagtattattagattggtaatatttctctttccataccttttcaaatatttcttctgtactatatactctgcctttattatttgctagtaaatataatatatcaaattctcttgatgtcaaaattatttcatttccagccactgttacactatgtttttccttatctataattactactccaacctttatgacatctttatcttcattattagcaccactaaaataatatgctcttctaatcagtgatttcactctcacagtaagttcaagtgggttaaatggttttgtcaaataatcatctgcaccagtcattatcccttgtattttatccatatcttctgattttgcacttaacataagtattggtatattcaaactttctctaacttttctacaaacttctatcccatccattttaggcatcattatatccaatatcattaaatgaatattttccttttttaaaatatctagagcctcttttccatcttcagctttaattacattatatccactatttaaaagatatatctctataaggtctcttatttccttttcatcatccacaacaagaactgtattattcatttttacacatcctaacttaatctttgtatatagctttattcatataaaattatactatattttagttagtgtaatctataaatttattcatttctaaatttccaatataatacaaattatttacacatttatattatttattttgtaaatattcttctaaagttaatccttttgaataaatttcctcggcagcatccttaccaacatatctaatatgccatggttcatatgctgtacctgttatatcttctttaccttcaggatatcttattataaatccaaacttgtgagcattttctgccaaccatttagcttcttttgtacttccaacaaaccatctttctggatttgttaaatcaatacaaagtccagtttggtgctcactgtaaccaggctttgctacatatgcatctgccttttctcgtccctgagattttacccttcttgtataagtatccagttgagtatcataagatctgtatgctgaagaccctaaaaactgtattccttctgaattagcttgcttaactaaatcttcaactgcctttgcaggttctcctgccatttgtttttcttcctctgttgcttcttcaacaaaaggtatgtttaccttagtaatattttcaggagtatagtttttgctaattccatttgtcttgtttaccaataatatatttgatatactatttgagtgatttttattttgagaatttgcctcaacatcttgttctgaatcatgttgagcagctactattggatctttatctttcttaagtaatctatctttagatataaatacacttataaatactactaaaataatggctcctattaatttaaattttttcataattaaatcttctcctttttgttatgtttgtctataatgttaattttagagtataagacttaagtattttataagtaaatcttaaataaatcttaaatttaatatttttaaaggatggtgataaaatgtctatacaaaaacttctaagtaaagctcgtaaggctatacaagattttgatatgatacaagaaaatgataaaattgcggttggactttctggtggaaaagatagtttaactctacttcatatacttaaaagttatcaaagattttctccacaaaactttgaattgatagccataacattaaatactggaggtgttgataattctccactagataaattgtgtaaagaaataaatgttcctttttatgaatttcaaactgacataaaagaaattgtatttgatataagacaagaaaaaaatccttgtgcattatgtgctaatttaagaagaggtgctttgaacgataatgctaaaaaacttggatgtaataaagtagctcttggtcatcataaagatgatgcaattgagacatttttaatgtctatgttttatgagggtagagtaaattgtttttccccaaagacatacctagatagacaggatttaacagttataagacctatgatttacatagaagagtatatgactaagaaaatttcaaaagattctaactatcctattatcacaaatccctgccctgcaaatggtcatactaggagagagtacataaaaaatcttattgctaatttaaataaagagatgcctgattttaaaagaaatgtatttggcgctttaaataattctgagaaattgtttatatgggataaagagaagataaaaaattttaaataataattaaaatttttaaataaaaaagcaagattgtattaattataaataatctttatataatctacacaatcttacttttttatttattatatgttattatctttaatctatattttaatagttcttaatagtatttattttgtctaatacattaattataacttaaatattttatatattaatttaatatattaattcattcaatctactggtttaatccatttttacagtatatacatctacatattataaaaagcaaaattatattttctaaatattttatgttagattataatattaaattctattatctctggtatattaaaaaatctaaatggtaactttgtacttccaagacccgaactcacatataaatgatttccatttatatcataaaaccctttagtatatttcctcccatatggaggagtaactaatgctcccttaataggtaatcttatttgaccaccatgactatgcccagatagaactaaattcattgtatctttactaagcatatctactaaatctggttcatgtgctaacaataaattaaaatttttattatctatctgactctccagatattttatattaggatttccatttaatatttcatcaacacctaatatattaatatatttatcatcttttaattttatttttttattttcatttactaaaagattgaagttggaatttttcataatctgcctataatacctaggaagtttatacatataatcatgattgccaaatactgaaaattttcccaacctagcattcatacttgataaaatagttgtaatttcatctacacttggatttttattggagtaatcaattaaatcaccagtaaatactattatatctggattcaaagtgttaatcttattagctacttttttgagattcttagttgaataaaaactacctatttgagtatctgaaatttgaactacttttacactttcagatttactctcaattgtatcattttttatcaatgctccattttcacttatattatattttttcacaattaatagactcggctctatcgcaactgagtatataaaaatcaaaataaatattaagataaaaaattttaaaaaatacttaatttttgagttcaaaatatctacctacttatttatttttttaaactatttgcattacagactcaactttgttcatttttctgtcatgcatttttggcttatttgctgaaaaccatttatatgttgctgtaagaccttcttttagtaacacatttggtatataaagcccatgttcaataagcttatttatatcaagattaaagtctatatttctaaatgggaaatacgttctttctctaaactctactttttccatatctacatattttattataggttctttgccaataatttctccacatgtatatataaggtcatcccaagaaattaactgtggatttgtcacattataggcctctcttacatgaggatttttcattatgctttccaatacctttaccaaatccccaatatatataaattgattactaacttgttttccttttggtactggtatcttttcatttttttctattttttcaaagaaataatactctctatataaattattattttcaccatatatgtaagttggtctaataattatatatggtatagggctatttataataaaatcttcagcctcttttttatttaacccatattttccccagttttcattttcacctttctcattttcttcttttatatttcttccactatctttatatactgctcctgctgacaatactatatacttttttaagttatccatgcttataaaatcaatcagattacttacatcttcttttgtatatgctgtcatatcatatatgtaatcatattttcttcctgtgataatgttttccatatcttttcgaacttttctatcacaaattagatgttctttaaaaccattataatctatttcctttttaccatttgtaagtatatcaatttgatacccacatttaatcaagcgcttagcaagtgcagaacctatgaagtcgcttccacccataattaaaatagatttcattttaagtgcatcctcctcttttttaaatgacttccttaactataatatcatatttttaaatatgcgacaccattttgtaatatttttgtctataaaagatatttataacaaaatatcttttatagactctacattttcgacaatataagtaggttcactttcactaagctcttcaaaagaaccatacccatacaatactccaatagaatctatacctatttttttagctccaattatgtcatactttctatctccaaccataataactttatctttatcttttacattacataggtctagtacatattgtataacttcatttttattcactcttgtaccatcaagattgctacctgctatatatttaaaatatctatctatatcaaaatatctaagtatagtttctgcaaaaactgttggcttagaagttgctactaataatattttaccatttttatagagcatttctaatatctctttcatattctcataaattttattttcaaatatccctttatcagcaaaatattctctatacttttcaacagcttctttagcttttttatcttcaaatttataatactccttgaaagtatcatgtaatggtggtcctataaattggtctaagttttccaaatcttcttttatgccaaagctatttaaagaatactgaatagactttgttattccttctttagggtctgtaagtgttccatctaaatcgaataatactatttcataattttttttcatatttcagtcctccatatttgtaaaaagtaatatcttacatattaagtttatctattttaaaaagctatagtaatagaaatttctaatactatagcttaagtacccaattaaatcttatatatttattttaaaaataaatttaaacagctctatttaactgttatagctgaaactggacatccttcttcggcttctttacataaatcttgtaaatctgctggtatttctccttcaattgctactgaatgcccttcatcgctcatactaaaaacgtctggacatgttcctatacatgctccacaagctacacatacatccttatcaacaaatgctttcatactaaaatacctcccctaaaattattattttttaattgttgtttccttagatatttatccaatatataccaatttaaacatatatttattattttatcactattgtttagtttattatagtattttcgtatccatgtctataaacttcactgcttttcatccatgattttacagtatattgcaatcttaattttttatttaaaacaagttcattattattgtagtcttttataatatcattacactcctccattgtgaatattgtaaaatcaccttctcctccaatctttattctgcctttatttccatgtaaatcgaaaatctttgttgggtattcagttactttttctatacacttttctagggatatcccaagttccataattttatttataacatttaaaagagaatagtttacgtctttcatgttttttatatgcatatcagtacttattaggtcaggctctaaaccttgctttattgcttttttaaaaactttaaaatcaaattggtccactccatgacatacatcgaacaatactcctctattctttgcatttattactgattttcttaatgtgccagattctttaaggattccatttgtactatttccatatactggtgtaaccacatctccttttcccaaaatattcattacttcatctatatatgatggatactctcctatatataccactaagggtaaatttaattttttagcaacttgctttgatttcttaattatatctataccactttcattagattgaaatttactcgcttttacttttataccctttatcttttctatatttttttctacaattgactcaaccttgtcaaaatttataacatctaaagaagttgattcattcaatatatttagtccctcatttgtaacatttaaaaaagaatatacttctgttttacactcatccatatacttttttttaaaatcatagtagtttgagggaccagctgtacctgcatcaaatataactgtagaacctttttcaattccaattgaatcagaatccatacctgtaggtaattttctcttataacaatgggtgtgaacatctataaatcctggggaaatatacatattatcggcatttattatctcgaactctttatttgtaagtaatttttcttttcttattttctctttaaggttcaatccaatagcatatattttcccatgtaaaaccaagatatctcttttttcaaatttgataccatctgttggagatattattgtcccatttcttataagtaaatttttcatttattccacatcctaattacaatataatttctctaatagcttttcttacataaagaaaataagcctaaaaataaaaatattttagacttattcactatattatactatattaattatattaaattaaataaaatctttaatttactttaagaagcaattaagtatttgttgctcggcttcttcttcagtaagacctaatgtcatcatctttagtatttggtctcctgcaatctttccaatagctgcttcatgtactaaaagagcatctggatgatttgcagcaatttcaggtatagcactaatttgagaatttcccataattattgaatcacattgaacatgtgcagaacaaagggaatccccaataacacaaggattaaacttttgcttagaattatcttgcccaactgtacgagaaactacttgagcagaagagttttcaccctctaagataaccttcatattagattctgcaacttgattaccatgagttaataatttctcaaatacaactattttagctcctttacctaggtttgcatccatttctcttttagttgaatctacacccttaatttgaattgtttccatttcacaatatgaatcctcatccatattgacaatagtaactggatttaaaattctctttccttctccatcaccttcaccataatgtttttctacatattttaggcgagctcctttacgtaagaaaaatctatgtataccattatgttcactatcatcacaaccacagttatgtataccacacccagcaattataacaacatctgcattttctccaatttcaaaatcattatataccatatcctgtacaccagcctctgttactattactggtatatgtacattttctccttttgtatttggctttactataatatctattccaggtttatcagttttaggaattatagttacattttcagttgaatgtctctctactccttgcccatttttacgtatattgtatgctcctaatggagttccacgaagttcagcaactttttctaaaagatttaaatctattttgttcatttaatttgccttcctttctaattaattcatgtctttcattaattcacaacttgaattaacttgacacatgatttcaggtaatatagcctcttttgttccatggctttttactgaaccatcttgtagaacaattatttcatcagctaactctaatattctttcttggtgagaaattatgattatagtctgattagactcttcatgtattttcttaaaactttcattgagttttccaaagctccaaaggtctatccctgcttcaggttcatcaaatatagaaacctttaaatctctagcaaaaagagttgctatctcaattcttttcatttcccctccagaaagagagttatcaacttcacgatttaaatagtcttttgaacacaatccaacatctgtaaggtattggcaacatacatcagtagacaatggttttccatgagcaagtgtaagtaaattttcaactgtcataccttttattcttggtggttgttgaaatgcgtatcctattcctttttttgctctttctgtaatactaagatttgttatatcttctccatctaaaattatctgaccactcgtagctttttcaattcccataataagcttagcaattgtagattttcctccaccatttggacctgtgataacaataagttttcccctctcaaatgaaaggctaacatcatttattattcctagttcctcattgttagactcaacattaaaggaaagattttttatttcaagcataatacccctcttttctataaaatattacattaatatccattcttttattatatcagtaatttttatatatcagcaactctaagcagataaaatgtatattaaataataaaacaaagttattgaaaagtaaaaaagatgagttttatgtaaactcatctcagaaatttagtatatcaacttatatgtatttaaaatttaaccttctatatactctaatattattttttgattatcttttaacataatttcttcttttttagattctattccattcttttttatctttacctcagctacaaaggcatcattaccttcaaccatttctaatagttcatacgcttttttacgacctattttagttgctatatcttttagtactgccattttcttaaacattttatcacctctactcaaaatttacacttaatttttaattatataattctaatcctagactagtttataataattattgtctctaattatatcagatattgagtaaatttaatactttgtaaaattatttatcctctctgactaaataatcatttccatcttggtctttaaaagaaaacatccttccatatggcatctccattaattccccaacttcaacctcgttatttgccatttgttcataagttccattaatatctcttgtacttaaaattattgatggatgagatacatttatctctttgttttgcttcatcattagatttttatcatacaacacaaatgttgtaaattcatttttacttggtgctacttccacccatttcatatttggacccatttccttttcataagttactacaaagttcaatttttctgtccaaaacaactttgcatcctcttgattatttacatagagagttatttttcctattttatttatcataacaatacccacctttattattaaataaatacctaatattttttatatttaataatatacccatatatattattttctatagatatatatttctaatatttatcgccaaattatgtaattctgctcaatatataatttataatatccatactattatagcctttatttatgtaatttaataaccttatatatcatacttataattatgataataactacataaaaaatcacttctaaatagagttatccatctaaaagtgatttcatatattctatgcaactttgtgttttagccactttgttcctcttaatcttaaacaatataaagtccctctaacaagccaatcagtatacatacctatccaaattcctaacactccaaattctaatacaacccccaatacgtaacctgtaaaaattctaaaaatccacatacctattactgcagtcatcattgtatatctagtatcaccggctccctttagccctgctgataatacaaaggatataggccatattaccatagctaaacaatcacttcgaattaattgtgttgagatgtcaattacactagcattttgagtatacatacttgaaatccagggtgcaattggtataaatatagctcctactataaataaacaaattgttgcaaatttagttaaatataataaagtactcttagctcctttaatatctccacgtcctatatactgtcccaccaaagttgtagcagacaaagctaaagcattcccaattacatttattatggatgcaattgacattcctattgcattggatgcaattgctgatgttcccatagtaactataaatacttgaacaatcaatttacctgcattaaaaagtagttgttcaactccagctggtatccctatattaaatatagacttttgagtttcaacatcaatcttaaatggaaatattttacccatagatataaattcatttcctttaaataaagctcttataattactatacatccaattattctagctatagcaatagatatagctgcacctgttatgccataggatggtgtttgcaaatttattcctagaggatttaaatcaataccatatataagtatatatcctaatgttacatttactatattcataaacatagtcacatacataggtttctttacatctccacaccctcttaaaataccatttgctatttgttgtgtcgcaataaatggatacgtaaataatgtaaactctatgtataattttgcatttgattttaccaattcttctgctgaaccataaaataaattaattacaccagttctaaaaacccacatcaatattgttattgtaaaggataatattactccagacactagagcctgcttaatagtttcattcaccttttcactatctttttttcctatttgttgagctacaacgacagtagctccaacagataatgcagcaaatacagatataaatatattgtttattgaatcaaccattccaactgcagatacagcttcttccccaatatgacctgccattattgtattaaatactcctaaaagcatgacaaacgtctgctctatcattataggaattgctaactttataacatttttccttataaacatccctattcctcttttccctctttatataaatttaatttttaattagtttatcgaactgtaaattgacaatgcaaagtttagaattgtattgttcgcattataatatactgctttcaaataatataaatcttgtttaatatcatttgaacacagtatatctttataattatcttatgtttattattttttatggataccacatttaaaatatttattaatttaatataaatattttccgttattattaaaagtagctatatttcgttaatattgtatcactatcgtgtagcaataacaataagtacattttatatattttttataatattatttaatcatccaaacttttaccactttttcaatatataaaatattacactttagatgtaacaaaatcgcatccatttaaatattgtattttatagactaattttaggatgtgatactttggttaatttaaatgcaaataatctaaatgtaaatatggtttatcctatttcttccacagcacccatacgtttcagaagatatactgtttcatatttagaaaacatggaaaatatttatttaactatagcaacatactttgatacacttggtttaggcacaatgaatatcgacaaagtttatggtcaatgggcttggtttactgataatatatatgatttaaatctatttgtttttgtaggaaattatccttatcaaattgctaaaaacagatatgatacatttgtagatattttgccagtagctattacttctattgtcaatggagatagagtatttttaatttcaaatccttgtttgttaaattcaaaaattacagttagatttatatctagtcatcctactcttaatagaacagttgattatggcaatattagagattttattttttaaaactgcaacatgatgtgctattaaaaaataccctaaatttaatgatattattaaataactagaatatttttaattggcacatcatgcctagctattataaattcataatattattttacttaagataagtactgtattttatctacttgtatatttttatttacctagtttctcagttctatatcctatttctttattagctagcttataaccttcttgtatcatttcttctctcgttaatgcactccctaataaattgtcaatactcagttgctctctatcactaaaatacttatccaataatgattcctctatatcttcctgatatgccaaatttccttcatgcattatatattttacatcgaaaccttctttatttaatacttttcccaccaaaatacttctatgacatcttataggttcttgcatagctcctaataaaactatcctataacccatttgacaacccttttttaatctttctattccgtttaaaaaaatatcttcttttgctactttctcaaaatctgcataaccttcttgcgtatatacatctttattatttcttttagctccaaattcttttcccatgtatatatatataaatccggaatttctaagagattcgttaaatgcctctttattgtattgaatattatatttagaatatggagtttctctaatgtcaactacacaatttatgtcatatttttttatcatattaataagcttatcatatggataatttgaatgtcctattgcgaatatttccatataaataccctcctattctttgaaattagtatctatatatgtagatacccgatttacttaaaattaaataaagtattactttaaatacccaatatctttttttcttgatactgtatatttttttactttatatccttaaaaaaatatacaactttatatataaaacatcaatatttatatatattttgtatattaaatacaattatttataaaatctttgataaaaatttataaatagagcatctttagaaaactattaacagaaaaacacactaaaaatttgattatccgctaaaacactgtatctatcggcattatcaaggagctaaacacatcaaaatactactaatttactacgattgaatgagccttgatacgtcctatttcccagatatgcaaagatacggtacagcacatcagtattgaaacaagaaaaattgaatacttcatagactacggaacgcacaatatcagcgttccttttctatttccagccgttcctagtggacggctattttactaccaaaatgaaaggagcatttagaattatgaaaaagatattaaaacgattgtgtacaggctttcttgcctttgcaactgtcgttaccgctttaccgagttcaacggttcatgcgtctaatacacagtattggacggaaagtaaagagcgtgtcagtatcgtagaacaagtaatgaatgacggttctatcagttctacctttaatgagggacatttaaccgttgagggtgaggacgcttattgtatcgacatcaacacagcctttaaaaacggctataagaccaaagctgacgcaagtacccgtatgagtgccgaccagatagctgacgtcgccttatctattgagtatgtgaaacagtacacagacatccacagcggaataagcagtaaacacgcctacctattaagacagcttgttgtctggcagagattaagtgttcagcctgactggcaatgggataatgtgcgagcttcctatgatgaaatcccaaaagccgtacaagatgaagtattcgcaggagcaaaagcctttgtgaaagaaaacaaaggacgttatgactgtggcggatatatctactctggcgagggtcaagagttagggcaattctgggcgaagttagctgtcggaaataccaaacttcaaaagacttccaccaatgccaatattacagacggcaacgggatttattcaatcgctggtgcaacatacggtgtgtattctgataaagactgcacgaaacagcttaccacccttacgactgatactagcggaaatacagaagccgttgaagtaagagccactatagtatatatcaaggaactttctgcaccagcaggatttaaaattgataaaacagtttactctttatctgtggaagttggaaaaacagcgactttaaaagtatctgatacaccaaaagtaacagataccttgattgagctattcaagattgacatggaaacacagaaatccaatccgcagggaaacgcttctttagagggagcagagtttacatggaacttctacgctggatattacaacaaaaacaatcttccagcacagcctacaagaacatgggtaacaaagactatcgctgaaaaagacagcgacggtgctatccattacattactcgtttagctgacaaatataaagtatcttgggacagcttctatacgcaggacggtaaaaacgtacttccattaggaacactaactgttgaggaaacaaaaagtccgtcgggttacttgttagagggtacatatatgcaggctgacggtagcgaagaacagataaaaggaatgtatctgacacagattacagaggacggcgaccttgccgtattatctggaagcaatcaataccatgtttctgataaagtcattcgtggcggtgtgaaaatccagaaacgagatttagaaaccaaagacacgaaagctcaaggcggtgcgactttgaaagataccgcctttgaaatcatttccttaaatgagaatgccgtcttagttgagggcaagttatacaagaaaaatgaagtgttaaagacaatccataccgacattgagggtatcgcttctacttctgctgacctattaccttacggaaaatacagattgtctgaacaaaaaccgccagagggatatttgactgacggtgcaaagccgattgattttgaaatcacagaaaatggaaaaatcgttgatttgactgacgaagcccactctatctataaccagattaaacgtggcgatattgagggcgtaaaaattggtgcaggttcgcacaagcgtcttgcagatgttccgtttaggatcacaagcaagacgacgggcgaaagtcatgttgttgtaactgatgataacggacaattctctactgcttctgattgggcttcccacaagcacaataccaatgcaggaaaaacaagcgaggacggtgtgtggtttggtacttctgaaccagacgacagcaaaggtgcgttgctttatgatacttacatcattgaagaattacgttgtgaaagcaacaaaggtttcaaacttattccaccgtttgagattgtcatttccagaaataaggttgtggttgatttaggtacgctgactgatgaatacgaaaaagaaatcactatccatactactgctaccagcaaggacggcgaaaagactattcttgctgggaaagacgtaactatcactgatacagttaaattagacggtcttaccaaagggacaaaatatcagttgaaaggctggcagatgttaaaagaagaaaatgcagagcttatcatcaatgacaagcgtattgagaatgactacatctttacggctgacagcgaaactatggaagttaaaatcgagtttacctttgacgcttccaatcttggcggtaaacagcttgtaacttttgaggaattatacgatttaagcaatccagacgaacctatcaaagttgcggaacacaaggacattgaggacgacggacagacagttactatcaaggaagtaccagaaacacctaccccagaagaaccagagaagccaaccacaccagatacacctacgaaaacagacagtcccaaaacgggcgacaatacaaatatccttgcctttgcaattatgatgtttgtttctgctggtgggctggctggtacatactttttcaaacaccgtaagatgaagaaatcataaggcggtagctgtatgagaaaagaaaaatcacgctctccgccatagcttagataggcagactatacctattctggcttgtctgccgattacctgcaagaacacggatagtcaagggtgcgttagcatttatttaccctttactatctgggggcttgctggcactttcctaaatgccagaatacacacatcaatcaaacttaaagtaagaaacgaggtaaaataatatggaattaaaatatatcgtgccgaatgtggcacagacttttggaaacttggaatttgcaggggaaaacaaagtagaccagcaacgtatcaatgggcgttacactctcgtatcaagaagttacaacttgtattcggatattcagagagccgacgacattatcgttgtattgcctgcaaaagctggcgagaagcattttaagccagagcagaaagtaaaactgattaacccacgcattaccgcagagggttacaacgtcaaaggacgtggatttacaaactacattttaatggctgatgatatgttaccagcagaaagcaaataagggggtatttgattatgagattaacaaatggaattgtattagataacgaaaaaacttttggagtattgaaattctctgcacttcgacatgaggtgcgtgtagaaaatgaggacggaacgacaagtgatgaaattaagcgtcgtacttatgatttgaaatgtagtgtgcaggaacgcatgatacaagtgtcaatccccgctgatgttcccgtaaaggactttccttataatgcggaagtggagttaatcaatcccgtagctgatacggtggcaaatgccaactttagagggactacggttgattggtacatcaaagctgatgatattgtattgaagaacaaaggcggtcaagctggaaatccgcagaacaacgctccgcagggacagcagaaaaagtaagctgacaaactagtttttcattgtaggagatataaacaactgttataatatggatgtggaaacagttaatttagacttataaaggagaaatgtgtatgctagataaaatacctaatgcagaggaaatgactgctttggtcggacaatcattatatagtgtatggaatgaattgtgtgccttgattgatgaaaagtatgaaatggaatgtctatggaataaaggtggcaaagcatggaattatgaatataagtatcgtcgaggtggcaaaacattatgtgccttatatgctagagaaaattgtgtgggatttatgattatcttaggtaaagatgaacggttaaaattcgatacatatagagataattattcaaaagaagttcagagaatttatgatgaaacaaaaacttaccatgacggaaaatggctgatgtttgagccaacagatacaactttgtttgacgattttgttaaacttttgaggataaaaagaaaaccaaatagaaagtagtttattaccacaccattagcaaatggatagtttcttataatagcggatatatgaaaatgctgtcatgtggacataaagaaaattggaagttgtggaggtagcaaaaatgaaattaaaaaaccctatgttggtagtaactgatatagataaatcagttgagttttataaaaaggtttttggactttatgtcattatggattttggggcaaataaaactttaacaggtggattagccttacagacaagtgaaacatacaaagagtttatcggtacaagtgatatttcttttggtggtaacaattttgaagtctattttgaagaagaagattttgataaatttgctgataggctgaaagaatatgatattgaatatgtccaccctattatagaacattcatggggacagcgtgtagtccgcttttatgacccagataaacatattatcgaagttggagaaaacatgaagatagtgtgcaagcgtttcttaaatagtggaatgacaccagaacaagttgcagaacgtatggatgtacctatgaaatttataaatgcttgtatgcgataaattgaaagttaggagactaatactatgaaaggatttgaacgcaaaaatcaattattttctctttgcggattgaattgcggactatgccctatgcttttgggaaattactgtggcggttgtggcaatggtaatcaatcatgcagaattgcaaaatgtagtcttgaacatggacagattgaatattgctatgaatgcaaacaatatccatgcgaaaaatatcaacacattgatgattatgattctttcatcacgcataaacggcgaaaagcagatttagaaagagcaaaaaacataggcattgagcaatataatcttgaacagcaggaaaaaacacaaattctttcttacttactttctaactataatgacgggcgtagaaagactttcttttgtgtggcagtcaatttattagaactttcagaattacaagaagcaatgaaacaaatacaatccaatgacgaattgaccttactaccatttaaggcacaatgcttgtatgtggtggaggtgtttcagaagattgctgaaaggagaaatataaaactgaaacttttcaagaaaaagtgattttcaaatttgaaattgtaacaaagattatttatatgacgaatgggggaatacctttggaaacagtagagttaagatttcaatatactcaaagtgaatatataaaagcagaaaggcaatatttaatttctagtaaaactatacataaatatgatattgctttagtcgctgtatttttgttgctgtcagtcgtttatatgctgttctcctcttttagcgtatttagtattttaatatttggattgataattgttgtaactgcattgggaagctatttatatatcctaatgcctatactgaaattcaaacaaactgcaaaatatcatgaggaatatacgctggtattttctaaggaaaacattaaatttaaaacacaaagcattgactcagaagtgaagtgggacatttactctgcactatgggaaagccatgatttttattacttaattcaagcaccacgattatatacgttaattcccaaaagaatttttaaagacctaaacgaaaaacagctatttgaagaaattgcacaatcaagagttaaaacaacaaagcatatataatgaacataccctacaatgtaacaacttcatattcatacacacaaagcggttagtcttttaagattgactgcttttttcatacttaaattaagattggagtgattgatttatgcgaatgattttgaataaaggacaccgtatcagagccagagacaagaaccttgtctaccacttttccatagggacgcttctgtttgtatttgtggcggttctcctgctactgaatatcaaacagctcatgcgtaccgactgggaacatttcagcttattggacaatggcttgacgctttccccctacaacttcataaccatattgatagcgactggtatttgtgcattggtcgcttttctgtattaccgcttctgttatgacagtttcaaaaagctcctgcaccgtcaaaagctggcacgaatgatactggaaaacaagtggtatgaagcagataccgtacaagacagcggtttttttactgacctgcaaagcagatcaagggaaaaaatcgtctggtttccaaagatttattatcaaatggaaaacggattgcttcatattcactgtgaaatcacattaggaaaatatcaagaccagcttttgcgattagaggataagctggaaagcggtttgtactgtgagctgaccgacaagaccttgcatgacggctatattgagtacacgcttttatatgacatgatagcgaaccgtatttccattgacgaagtgaaagcagaaaacggctgtcttaggctgatgaaaaatcttgtctgggaatatgacgtactccctcacgctctgatagctggtgggactggtggcggtaagacctactttctgctgacgcttattgaagctctgctacatacgaatgctgtcctttacatcttagacccaaagaacgctgaccttgcagacttaggtacagttatgggaaatgtgtatcataccaaagaagatatgattgattgtgtcaatgccttttatgagggcatggtacaaagaagcgaagaaatgaagcaacacccagactataaaacgggcgaaaactacgcctatcttggtttaccgccctgctttcttatctttgatgaatatgtggcgttttttgaaatgctggggacaaaggaaagcgtaagtttacttagccagttaaagaaaatcgttatgttgggacgacaagctggatatttccttattgttgcctgccagcgtccagacgcaaaatatttctcggacggtatcagagataatttcaatttccgtgttggattggggcgtatcagcgaattgggttacggtatgctctttggttctgatgtgaaaaaacagtttttccagaagcgtatcaaggggcgtggctattgtgatgtgggaacaagtgtcataagtgagttttacacgcctttagtcccgaaaggacatgattttttgcagaccataggctctcttgcattcgtaaggcaggacgggacggcgacgtgcgaagcgaaaggcgacggcacggactagccgttgctggtgtggcgttagccacgccagcagatataagcccctcattatctaacagaggggcacaattacgctggaaactggttcaaaaaccttgaaaagtccgctaggaataaggattttcttagtttttagctagttgtgataatcacttgaaaatatcacaaaatcacaacaatatcacgattgggggtatgacaactgaatgatactgattttctgaacaccttgaaagcaaaacgcagtgattatggcgtatcgcagacaaggcttgcaatcatggctggtatcagccgtgaacatctaagccgtatcgaagctgggaaggtagcactgaccgaggatatgaagcacaaactactggaagcggtggaaaaattcaatcccgacgctcccatgttcctgctctttgattatgtgcgtatccgatttcccacgctggatatacagcacgttatcaaggacattctaaagctgaatatagattatatgcttcacgaagatttcgggcattacaagtacaccgagcattactatatcggggacgtgttcgtttacacttcacaagacaaggaaaaaggtgtcctgctggaactgaaaggaaaaggctgtcgtcagtttgaaagctatctgctggcacaggaaagaagctggtatgacttcctcatggacgcattagttgatggcggtgtgatgaagcgtatcgacctagctatcaacgacagaacgggcttactggatattccagaactgatagagaaatgcaagaacgaggaatgtatttctaaattccgtagcttcaagaactatggttctggggagctggtaaagcacaacgaagccaacaaggacggcatgggacatacgctttacattggttcatttaccagtgaagtgtacttctgtgtctatgaaaagaattatgaacaatcctcaaaattagggataccgattgaggaagtccccattaaaaaccgatttgagatacgtttgaaaaatgagcacgcctactatgccattagagagctgctgacccactacgacgcagagctgacggcattttctattatcaaccagtatatccgctttgccgataaggaagccaacaagcgaaaaagcgactggaaaaccaacgcccgctggtcttggttcattggcgagggacgaccgcccgtgaagctgacgacaaagccagagccttacactctgcaaaggacgctgaactggttacaaagacaggttgcaccgaccttgaaaatgctgaaacagatagacgctggcaatcagatggactatctcaagaccattgaacagcaggcaaagctgacagataagcacaagcagataatcagacagcagacggcttcggtggacgaactgatagaaaaagaaaaggagtgattgatgatgtgggaattgattaaggacttactgctggtatcacttggcatgggtatcggcgtggttctgatgtgtattatgagtgtcggaaaggaagctgaccgacacatgattgaattaaaagaaagcgaggaaaaataaatgaatttcgggcaaaatttatatacatggtttttaagcaacgcccagagcttagtgcttatggcgattgtggttattggtatctacttagggtttaaacgtgagttttcaaaacttatcggcttcttggtggttgccttagttgctgttggattggtattcaatgcaggcggtgtcaaagacgtactcttagaactattcaataagattatcggcgcatagccgtactttttcattatggtttgcggatacgcaaacatacctttcccactttgggagtgggctaaggggaaagggggtaacggaatggtacacagataaaaatacagcataatgaatttcattgcttggctcaaacatagttgatataataaagatatgaaaataataaacgaaagtttttttgataaggagtgatattgtgaaattgtgtattgttttatctccatataaggcttaatggaatagacttgtatggagtgaaatgttatccagagagccttacattttatcaaatttcaaaatgtaaaggagaatgggcatggaatataaatatacaaaaattgatttgaataaatggaatagaggtaaattgtttcaaagctacattgataatatgcgtattgttatgagcttaaccgtagatattgatgtaacaaagtttattgaattttcaaagaagcatgatttaaaattttatccagctatgatatgggctgtttcaaaggttgttaatgaacatgatgagttcaaatatagttgggataataatgggaatttaattaagtgggattatatttctccgtcctatactgaatttcataaagaagatgaaaatttcacaaagatagttacagatttttctgatagcatatttgaatttcataaacgttttatattagatagggagaagtataaaacagaacgtgcatttgtggaaaatcaatctttgaacttttttgatgtatcttgtttaccgtgggtaaaatataatcattttgatgttcatgtttttgacgagggaaaatttcttgcaccagttattacttggggcaaatatgaattagagcaagaaagatatataatgcctcttacaatgaatatacatcatgccgtagcagatggattccatttatccagattttttaatgaagtacaagaattgataaactcaatttaacagctatatacaaagcagttagtctatacgattgactgctttttttcatacctaaatttaagattggagtgattgcttgaaagatatattttcggatatgcaggcaagtatcggctgtacctacatttcagatttaccacatcataaacgtatggtgtggcaggaaatgaagcgactgaaccttgccgattatccgcagaaacaattagaagattttgcaggctatgtctttggtgtcccttacactagcatagctgaagcatgaaagaaaggacgtgaaaacctatgaatgaaatgcgtgtctgtatcgaaagccgactacacacttctgaagaaatccgttccgcatggttcacacttcccattgacgaggaagaactggaagaacagataggcgttcctatcgacagtgaagattaccatatcgttgaaaaggaactgccctttgctgatgaagtcggcgaagatgcgaccattgaaaaactgaatgacctttaccatacctttgaaagtctgcctgccgatttacaagaggactacggggagctgatgtgttactttaccagccttgacgaactgcaccagcaccgccatgatgtgatacattattcatggtgtaaaaacatggctgatgtggcaaggcatttgttggacaatgaccctgctttttctgccatcgaggaacgcctgacccgttactttgattatgaagcctacggacagtatcttgatgataacggagaatttatagaaacagaccacggtatctatgaactgccgtagaagtgaggtgtttctatggtagaggatatgcgtgtatatatcgctaatcttgggaaatacaatgaggggtatctggtcggcgactggttctcttttccgattgacgaagaagatgttgccgagcgtatcggcttgaatgaacggtacgaagaatacgccgtacatgatacggaaaactttcccattgagattggcgaatatatctcgattgaagagctcaatgaaatgtatgaaatgatatgtgagcttcccgactacatcacggacagtttggacgaatttgtatcaaattatggaagtttggaggaactgtacgaccatagggacgatatgattttatacgctggctgtgaggatatgaccgacgttgcctattacttcattgatgaattgcaggcacttggcgatattccccctagtttgcagaactatattgactatgaagcatacggcagggatttatcctttgagggaacttttattgaaacaagatacggtatgtgtgagataccgtggtaagaagctggaagatcagcgacaagcattgttgcttctgacagctttttctattggggacagtctgaaaaacggctgtccttttctattatacgaaaggagttgaaacaaaaacgtgaaaaagattaaaagctacacgggtatctggaacgtggaaaaagtcttgtatgcaatcaatgactttaacctgccctttcctgttacctttacacagattacatggtttgtgataaccgagtttatcatcattctgtttggggacttaccgcccttatccatgattgagggggcatttttaaaatacttcggtattcccgtagctcttacatggttcatgtcgcaaaagacctttgacggcaagaagccgtacagctttttgaaatcacagataacctttgccctacgaccaaagattacttatgcaggaaaagccgtgaaactggataagcaggtactacatgaagctattacggcagtaaggagtgtgagctatgttcccgattaaatatatcgacaacaaccttgtctggaacaaggacaatgaggtgttcgcctactatgagctgataccttacaattacagttttctatccgctgaacagaaattcattgtgcatgacagcttccgacagctaatcgcacaatcccgtgagggcaagatacacgctttgcagattgccacagaaagctcaagccgaagcatacaagaacagtcaaagaagctggttacgggacgactaaaagacgttgcctatcagaagatagacgaacagaccgaagcgttagtatctatgattggggacaatcaagtggactaccgcttttttcttggcttcaagctcatggtaacagaccagagcatgaacctaaagagcgtgaagcaatcggcgtttctcacattcaaggagtttatccatgaagtgaaccacacgctgatgaatgactttgtttccatgccaaatgatgaaatcaaccgctacatgaaaatggaaaagctgttggaaaataaaataagccgacgcttcaaagtaagacgcttagataaaaatgacttcggctatctgattgaacacatctacggcagggacggtgtcgcctatgaagattatgagtatagcttaccgaagaagaaactgaaaaaggaaacgctgataacgcattatgacttgatacgtccgacccgttgccttgtggaagaaagccagcgacatttacgcttggaacatgaggacagcgaaagctacgtttcctactttactgtcaatgcgattgtcggcgagcttgattttccgtccagtgaaatcttctatttccagcaacagcagtttacttttcccgttgataccagcatgaatgtagaaatcgtggaaaaccgaaaagcgttatcgacggttcgcaacaagaaaaaagagctgaaagatttagacaatcatgcataccagtctggcagtgaaaccagctcaaatgtggtagacgcattagacagtgtggacgagctggaaacggatttagaccagtccagagaaagtatgtataagctctcttatgttatccgtgtatctgctccagaccttgacgagttgaaaagacgctgtgatgaagtcaaagacttctacgacgatttgaacgtcaagctggtacgccctgctggcgatatgctggggcttcactctgaatttcttcctgccagcaagcgatacatcaacgattatgtgcagtatgtcaaaagtgattttctagctgggctgggctttggtgcgacacagcagttaggggaaaacacgggtatctatatcggctattctgtcgatacgggacgcaatgtttatctacaaccgtcccttgccagtcaaggcgtaaaagatacggttactaatgctcttgcttctgcctttgtagaaagtcttggcggtggaaaatcattctgtaacaacctgcttgtctactactctgtgctgtttggcggtcaagcggtaatcttagacccaaaatccgagcgtggcaactggaaagaaacgctcccagaaatcgcccatgaaatcaatatcgtgaaccttaccagcgacagagaaaatgcagggcttcttgacccgttcgtgattatgcagaatgtgaaagacgctgaaagtctggcaatcgacatactcacattccttacgggcatttcttcaagggacggcgagaagttccccgtacttagaaaggcagtgcgtgccgttacccagagcgaccagcgaggattgctccatgtgattgaggaattaagaaaagaagatacacctatctcttgcaatattgccgaccatatcgacagcttcacggactacgactttgcacatctgctgttctcggacggtacggtgcaaaatgcaatcagcttagacaaccagctcaatatcattcaagtagccgacttagtgctacccgataaggacacgacctttgaattactgtccgtttccatgctgattgtgattagtacctttgcgttagattttatccactcggatagaagtgttttcaagattgtagaccttgacgaagcatgggcgttcttaaatgtggcacaaggcgaaacgctctctaacaagctggttcgtgctggacgtgccatgaacgcaggcgtttattttgttacacagtcctctggcgacgtgtcaaaggaaagtctgaaaaacaatatcggtttgaaatttgcctttagaagcaccgatattaacgaaataaaacagacccttgaatttttcagcattgacaaagaggacgagaacaaccagaagcgattgcgtgatttggaaaacgggcaatgcttgcttcaagatttatacggacgtgtgggcgtggtgcagatacacccagtctttgaagaattactgcacgcctttgataccagaccgccgatacagcgaaatgaggtggagtgatgaaagaaaggataaaaagtgtgttcacaagaaaaaagatattccgctttctcaaaatggctctgtttgtcgtggcactttcccttatcctgctttcacttttgggaacggtggcacacgcaacgggacttgtggacgacactatcaacaccgagaacctttattccaaatatccgctgtcgaattatcagcttgatttctatgcagataataactgggcgtggttgccgtggaactggctggacgggattggaaaaagtgtgcaatatgggctttactgtattaccaactttgtctggacgataagactatatctaagcaatgcaacgggctatgtagtgcaggaagcctacaagctggactttatcaacgatatggcagacagtatcggaagaagcatacagacccttgcaggcgtaactcaaaatggtttttctacttcgggcttttatgtgggatttcttctgctgattatcttagtcgtaggtatctatgttgcctatacgggactgataaaacgggaaaccagtaaggcactacacgccgttatcaactttgttgtggtgttcgtattatcggcttcttttatcgcctatgctcctgactacatcaagaaagtgaatgacttttcatcagacatcagtaccgcttcactggacttgggaacaaaaatcatgcttcccgacagcgacagcaagggcaaggacagcgtggacttgataagggatagcctattttccatacaagtacaacagccgtggctactgcttcaatttggtaattcgggtatagaggaaatcggggcagaccgtgtcgaagctctcgtatcggcaagcccagaggacgaggacggcaagaccagagaggaagtcgtgaaaacagaaatcgaggacaacgacaacaacaatctgacgatactgcaggtggtaaaccgtttaggtatggtgttcttcctcttgttcttcaacttgggtatcacgatatttgtattcttgcttacgggtatgatgttgttcagccagatactttttatcattttcgctatgtttctgcctatcagctttctattaagtatgataccgagctatgagagcatggcaaaacaagccatagtccgtgtgtttaatacgattatgacaagggcaggtattacactgattgtcacggtagcctttagtatttccagtatgttctacaacatatcgacggactacccgttctttatggtggcgttcttgcagatagtgtattttgcaggtatctacatgaagctgggcgatttaatgagcatgttctctttaaacgctggcgacagtcaaagcatgggacggcgaatattccgcagaccgtatctgttcatgcgacatagggctagacgtatggaacataggcttgcaagagctgttagtgctggtggtgtcgctggtgtggtggctggtggtgtcgttgccagttcaaaatctacacgccagaatggaacaaagaacaatcgtggaaatacaagctccagcatggggcagaaagcaggttcagccgtgggagctgtccttgatacaaagaataaggtcaaggacaaggcaactgctgtcaaagaaaatatcaaagatatgccgacacagactgcctatgcggttcactctgctaaggaaaaggcgaagtccagtgtgtctgatttcaagcgtggcgtggtgcaggaaaaggaaaaccgccagtctggacgcttaaagaagcaacagctacatagacagaatatcgctgacaagcgtatggaacttcaaaaggcacaagaatcaaggcaggcaggtaagaaaacggacggatcagcgacaagcggagctacccgtccccatgaaagaccagctaccacttctaaggttaatgtagaaaaacagcaggaagtcaaacgccctgccatagcttcaaccgtgaagaatgatgaacctatcaagaaaaatgttgtcaaggaacgtccactatcttctggcgatacatcagcaaagaccgtcaatcaagaaaccacaagacagaattacaagactgaccgtgttacgaaaacaaccgttcagaagcatacacagcagaataccgagaagaacaaacgaaccgtattcaagaaaggacaaaagaagaaatgaaactaagacatatcgctattgttggcagtctgttttctatcctcttttctctcgtattattctttggggttctgattagtgccgaggacgacgacgggggcaatggttattcctctaattatgtaggtatgaacctatctgccgaagtcttgaaacatcagcctatggtagaaaagtatgccaaagaaaacggtatttccgagtatgtcaatgtgttgctggtaatcatacaagtggaaagtggcggtacagccgaggacgttatgcaaagctctgaaagtctgggactaccacccaactcactagatacggaaagctcaatcaagcaggggtgtaaatattttgcgtccctgctttcttcctgcaaaaatcaaggtatcagtgatataaatgttgtgatacagtcctataactatggcggtggctatgttggctatgtggcaggaaacggaaaaaagcatatgttcaaccttgcggaaaacttcgcaagggataagtcgggcggtcaaaaagtaacctatacgaaccctatcgccgtggcaaaaaatggtggctggcgttatggctatggaaatatgttctatgtggagcttgtgaaccagtaccttgttgtcaatcaagtatcgggcgagctggcacaaaaggttatgaatgaagccttaaaatatcaaggttggaagtatgtatatggtggcagtaacccgaacacttcttttgattgttcgggactggtacagtggtgctacaacaaagctggcgtatctttaccgagaaccgcacaaaatcagtatgacgcaacccagcatatcccactatcgcaggcaaaggcaggcgatttggtctttttccacagtacctacaatgcaggaagctatgtaacccacgtcggtatctatgtaggaaacactcagatgtatcatgcaggcgaccctatcggatatgccgatttaaacaatgcttattggcaacagtacttgatttgtgctggaagaataaaacagtagaaaggattggaaaccatgtttaaaaagaaagaaaaaccagtaaaagaaacgaaagtccgcactatgaaagtaggcacacataagaaatctgtgattgctctgtgggtggtgcttatcgccagcgtatcatttggcgtgtataagaactttaccgccattgatatgcacacggtacatgaaacggaaaccattcagttaagactaaatgacaccaacggagttgaaaattttgtgaagaacttctgtaagtcctactacacatgggacaacagcaaggaagctatcgaagcaaggacgcaggcaatcagcaactatctgacaaaggagttgcaggacttgaaccttgataccattaggacggatataccgacaagctccactgttacaaatgtactgatttgggatataaaacagtctggaacgaacgattttatcgctacctacgaagtagatcagcagataaaagagggagaacagacaagcaatgtcaaagcaacctataccgtcaaagtccatgtggataaagacggcgatatggttatcgtacagaacccaaccattgcaccagcgattgaaaaatcagactatgagccaaaggcacaagaagccgacgcaagcgtggacgcagataccgtcaatgacgctaccgcatttttggaaactttctttaagctgtatccgacagcaacagaaaaagaacttgcctactatgtggctggcaatgtgcttgaacctatcggcagggactacctctattccgaattagtcaatcctatgtttacggatgacagggataatgtgaaagtcagggttgcggtgaaattcattgataatcagacaaaggcaatgcaggtatcacagtttgagcttgtgttacataaggatagcaactggaaaattattatgtaagatattttgttggcaggctctattttcggatatagtctgccttttctatagcaaatgtgctgcactaacaagcgatttcattgtattttaagcaattaaatctttcttgacaattttatcttaaatcatatatttatggatattgactttctgcttgcaataagttataatatgactataaaactaaattagtcatataggaggcgtgtggtatgtataaagaagttggtatttcttcaaataatgttccgataacactttctatttggtatacagaaagaaatagtcctaccattgtttttttgccgggtactatgtcacaccctctcatgtatgagaattttctatgtggtttgagtgaaagaggatttaatataataggcattcactatctttcacacggaaaaagccctaaaatcaaaaaaaattatacaatggaagatttgctgcataatgtatatgacgcaacgacttacggaatagaaaattttggtgaaaacatagctgtcatgggttccagtcaaggtgggattttagctgcaatggcggcgggtagggacacaaggttaaaagccgtttttccacataatatcatgctgactacattaaaagaaactatgagcttaacaaaataccccgcatggtcacaccgttttatggggctgatacagttgggctttcgtgtaggtggaaaattgctgcctaactataaggttccaggagacgcttatttagactatgacagagtattttatagtgaacaggcaaaacaagattgcttaaatgaccctatgcttttaccctattatcctttaagatttgtcgccagcttatttaatgctgacttatcgtgcttggagaatggggctatacaatgtcctgttattttaattactgccaaaggcgatccgctttttagatttgattataccaacaaagtatttgatttaattcatgtaccgaaaaaggaattacttactttagagcttaatcgtcacatgatttttaatgaggacacggacactacaataaacgcattggaagctaccttgcataaatatcttggatagtatattgattatataatcagtaaatgttatacttttcatgacgataaaaacattttagtcataagggggttatgagtttgccacgatttacggaacaagaaaaagaaatcataaacagtaaacttttgatagagggagaaaagctgttttcattatacggcttaaaaaaagtaacagttgatgatttagcagctgctgtaaacatatcaaaaggttcattctatgctttttatcccagtaaagaacatctatatgtggaaatcaattttcgcttacaaaaagagttatttacaagtatagaaacaactgttaaaaagaaaaagtataagaaccatagagatttagcaaaggacgttattatgctaagtttaacgggggtgattacttcgcctattctttcacagattgatttatctttaatggactatctgcaaagaaaaatatcgtcagatatttttgaaaatcatatgtacagtgatattcgtatattggagatactggaaggtttaggggttgtatttttggttccgcatacggttatcataaaatccctgtattctgttttatcctgtttggaacaattcaaagaggacgaagaattgaatatggtacaaaatcttttagtgaatggtattattcagcaagtagtagcagagtaataattttgtttggttatttgacaggcaagtggccaaacaaattttttacagtttatatgactatatatctataaacgtcataaagttaaaggaggaaagaataatgattgatgtaaaaaaactgtattttagttatactgacaaaccgtttgttgagaatgtaagtttccatgttgggagaggagaaattttcggttttttaggaccctctggtgctggaaaatcaactattcaaaaaattttaactgggcttaatacaagttataaaggcagcgtaaaagttgcaggtacagaaataagggagcatacaaaccggttttatgaaaatattggagtagactttgaattttcaacctgctacgagaaattcacagcacgacaaaatctcgcctattttgcttctctatatgacaagcaacctcggtctattgatgaattattgcatatggtaggcttagaaaatgatggggacaaaaaagttgctgacttttccaaaggtatgcgttctcgcttgaatttcattaaagcgttagtacatgaccctgatatattattccttgatgaacctacaagcggtcttgaccctacaaataatcgtttaatgaaagatattattcttgcggaaaagaaacgcggaaaaacgattatcattactactcacaatatgtatgacgcaacagagctatgtgaccaagtagcctttattgttgccggaaaagtcagtgcattggatagtccacataatttgattatgtcaaggggagctgccaaaatacactatacctactatgataaaggcgagaaaaccggagaatgtctgcttgatagaaccacagaagataagttgttaaaaagtttaatttccgaaaaccgtctgctttctattcatagtagtgagcctacattaaatgatatttttgttgatattacagggaggacacttcaatgagattgggacgtttaatttgtggtgatatacatttccaatggaaatatggtttctattttatctactttatattaacagttttatatgtgtgtgggattgccgctttgacgggacattggaaaacggatattgcttctatcatgatatactctgacccggcagctatgggattgttttttatgggggcgattgtccttttagaaaaaagccaaaaggtattaaatgctatggtagtatcgcctgtaaaagtatcggagtatatactttcaaaaaccatcgcattgattgctatttctacaatcattgcggtgatattgggatttgtttccggcagcaatcatttacttggtatcgcagttggtacagctttgacatcagcaatctttactatgcttggcattatcgcggctacaaaaatttcaaacttgaaccaatttctcattgtgattatgccgatagaaattgtttgctttgttccacctatcgttggtctgtttgtaaagttaccagatatattccgcttttttccgttcacagcttgcatgaacctcataactggaaaaagcattttactatcgtttgatatggtacttgtaattgctacgttgattatcctctacatagttgcgcgacatacagttaagcatatgtggagaagtttgggaggtgtaaagctatgaaaaggatattatccagtaccatacaggtatttaagcaaatcaagagcgaccctatgatgtttgcagcttgttttacgccttttgtcatgggagctttgattaaattcggtattccctttcttgatggaataacagatttttctttgcaaacatactatccgatctttgatttattactttctatcatggctcctgtattgctctgctttgcatttgcaatgattacattagaggaaatcgacgataaagtgtcacggtacttttcgattacccctcttggtaagtcggggtatctctttacaaggttgggagtaccctcaattatttcggcggtcatcgcttttattgtactgttgcttttttcattagaaaagttgtccattggaatgacaatatgtttggcgcttctcggctcagtacaggcaattattgtttcgcttatgattataacattatcaagcaataaattagagggtatggcagttacaaaactagctgcacttacattactcggaataccagctcccttttttattgatagttactaccagttcgcggttggcttccttccatcattttgggtagcgaaagccatgcagaatgaagcggttctttatttctccataggattgatggtagctttggtctggtactacttccttataaaacgtctgtttaggaagctggcaggataagaaggcatattatggaaaaaggtagacttctgcaaaacgaaaatataaataaggctattcaggtttccaaaatcacactaatcatcaacctgggtttatcgctacttaaatttgctgccggatatataggaaagtcaagtgccatgctgtcggacgctgtacactcggcttctgatgtattaagcacaatcgttgtgatggttggaattaaaatatcagaaaaacagcctgataaagaacatccttatgggcatgaacgtatggaatgtgtggcttccattattctctctgttgcattggctataacgggtgctggaataggatattcaggtatcaagaaaatcttttcaggacagtacaatacgctttctgtctctagtggaatcgcacttacggcggcagtcttatccattgttataaaagagtggatgtactggtatacaagaagtgctgcaaagcatacaaattctgacgcacttatggctgacgcatggcatcaccgctctgatgcactctcgtcggttggttccttaattggcattttaggagcacgtttaggctatgctattctcgaccctattgcaagcattgtgatttgcggttgtatcttaaaagctgctttggacattttcaaagaaagcattaacaaaatggtagaccatagttgtgacaatgctactgaaacgaagattagggaagttgtgcttcagcagcaaggggttgatggtattgatgaattaaaaacccgcatgtttggagcgaaaatgtatgtagatattgaaatattagctgatggtaatttagctctttatgacgctcatagaattgctgagggagtccatcaaacgattgaaaacaactttccacaatgtaaacattgtatggtacatgttaatacgaatgaacttccctattctccataggacagggaagatgatttaagactattgaaagggaaaggaggggaagtaggttatggaacaatactggtggattatcattgttatggttttgattgtcgttggcttacttaaaattgtaattatgaagaagtataaccaaaggagaaattctaacaatcgttcaaaaaatagcgaggatgacaagatgtattaagagcaattatccgatggtatgagatatatacctatgaaatttgaacgataaatcccagtttgtaaaagtcaataaatccaaagataaatttgtatttgaaaggagttttgaagaatgaaaaaatatgagtatgtagaaattaattataatgcgaaaggagttgtattcctttgtactgataaacacaaagaaattattgacagttatgcaaaaacggggtatcactacgcagggtttgtacccacagaaattgacgcaaaaggctgtatgcgaaagatagatttaatttttgaaaaagaagattaacttattttagggagttggttctaatgataggacttaaaagacgagatatgaattatattatgaaagttggtgctaaagctcaaggtgtttctgtatctgaatttagggctatgctacaagataccatagacaaaactatggaaagtacagacccagacgtgcaggcaaattttaaacgatactttggaaataagcggccaacaccagaggaatatatttatacgattaccaaaaagacaaaggttaaggtttaaatgttgtaaagggggcttgccgtatgaaacgctttaaatacaattcagtatattcaagcccaatttaacagcatactatttacaattaaatacgctataccagtagctcgtacaaaatttatattttgtgcgggcttttttaatacccgaaaagttttttaattattttcatttttttggaagcaaatcacaccttgctgtacagatatggtgcggaaagagggataaacacttttcaattcatagctggaaaggaggtgagattatgaaaccgtctgacttccaaaaaacaattcagtgtcagtttgaatgtaagctgaaaaaagttgtcaaaggtattatctggaactaccgcaaagaattaagacgaagaaaaaacaaggaaatatcttttagcgaattaccagacattacggtagaaagtctggcaacatgggacgactacgaaacaaactacacaatttttaatgtgtgtggcatagatattaaagtccttgatgatgaacttgcagaagctctcaaacagctacccgaaaaaaacgtaacaatgtattgatgtattacttcttggaaatgagtgatacagagattgcagatattatgaattataccagagaggctgtgttcaaacacagacaccgtgcactagaaactatgaaagagatactaaatgaaaagacaagacagtaaaggacgcaatttgcgtcttggagagagccagagaaaagacggaagatacgtttataaatataccgatatattcgggaagccacagtttgtatattcttggaagcttgtacccacagacaagacacctgctggaaaacgtgatgatatatcgttgagggaaaaagaaaagcagataaaaaaagaccttgacgacggtatcgacacggtgggcggtaaaatgacagtctgccagctttacgaaaaaaagaacaatcaaagaaagaacatcaagagaaacacggaattaggacgacagtatcttgtgaacgcactggaaaatgacccattgggtatgagggcgattgatacggtcaagcagtccgacgctaaagaatgggctatcagaatgaatggcaaaggttattcttacaagacgatagataactataagcgttccctaaaggcttcattctatatggcgatacaagacgactgtatcagaaaaaatccttttaattccaagttgagtgatgttctggaagatgatacggaagcaaaggttatcctgacaccagagcaggaagaaaaactccttgcctttatggaaacagataatgtttacagcaagtatcgtgatgaagttattcttctgctggaaacgggacttcgtatctctgaattatgcggactgacaacacacattgatatgcttaaccgtgtgattaacatagaccaccagctattgcgtgatacagaggtgggctactatatttccaaagctaagacaaaaaacggtaagcgagagcttccattaacagaaagagcatatcaagcactcaagcgaattttaaagaaccgaggaaaagcacaaccgcttgttgttggtggttatagcaatttcttattcttgaaccgtgagggattgccaaaggtagcaggaaattatgaaagtatggtgcgtgggttgattaagaagtacaacaagacccataaggacaagttaccaaacatcacgccccattcattcagacatacttactgtacgaacatggcaaataagggaatgaacccaaacaccctgcaatacatcatgggacacgcaaacataaccatgacattagggtattatgctcacggtactttccagtctgcaaaggcagagttagaaaggctggcttcttaatatcgaaaatgtatcttactacttatttactacttttggttgcattttcatgctggtaaatgccagcttatgcaaggtatcttccaaaaagaaaatgcccatacagcccgaaaatgcgggatatatcggcatctaccaacttatgaaaagataatcagaaatttagtaagtttttataataaaaaaataagaggctgtccaaaaatagagataagccttttttcataatcggaattataaaaatacacttgatttcatatgaaaaagagtgtctcataaactaaaaagtttactttgagacactaccttttttattcttatttatactttgtagacatattataatatgcgtttcactggtatctgaacttctgtcaaccagtcttcttcactctctttattccatataccatctatataagattctctaggatttccaaccactttatatttattgtcctctatccatttaaatgcatctgcataagtttttcctaatgttgaatatggaccattgtgtaatatacaaactgcattttcaactgcatctaattctttaaattttaatatatccgtatcttcctttaaatcatttatagcttgacacatttcaacatccatatcagtctctctatattcaccatcatgatatatattaaaacaataatcaggaactgcacatgtacaccctgttttcatcatttcttcagccattacatttggaaatagattaaaaagttcatcatatccctttaacacttttctcatagaagcaactttaacttttggtaaagacttaataattacatcattcatattgacttctcctttcaaattcataaggtaattacgtagtttaattattttatattcttcacttttaattacatccaacatttctttttctttattcattaaaatattttcaacttcttcaggattttctacagctttttttatctcagctaatgataaacccatttgttttaaagttattatctgatgtaatttaggtaattgctctgttgtataatacctatattttgtaaattcatctacatattctggttttaacaaccctatatcttcataataccttaatgtctttgtagttattttatttattttagaaaacattcctatagaaaacatctcatcacctgcgcattagatttgattaatttaagtttaaactttccccttaggttaaagtcaatacaaaataaattataattgtattaattcttcaattctatctccactcaataccaaaatatcccctgtttttataatggttgaacctttaggtattaaaacctgttcctttctttttatcataactattaatatatcgtctggtatattagaatctattatactcttattagcccatttattaccctcatcaacatttacttcgataagtttagagctaatttccccatcataatcattaaatgtttttaatacaggtgtattatcatcaactaaatccaactttctggctacagttggtatcaatgaaccttgtattcctactgaaagcaacgctataaaaaatattatatggaatatgtcattctctatggctactccttgagtaacagcataaattgcaaaaactactgaagccgcacctctaagacctacccacgatatgaataatttttctttatttgagaatttaaattttgctagaactataaatgttgctaatggtcttgcaataactatcatgaatatagatatggccattgctataccaaatacatttggtaacttagaagggaaagataacaatcctaacataaagaataacattatttgcataatccatgaaattccatcaaagaaatgaaccaaactttttttaagaggtatcctactatttcctataataatacctgaaatgtaaacacttaaatatccatttcctccaagatactcgctaaatgcataagaaagtattgcaatagctgttataaatatagtataaaatccttctatctcgaagtttgaatgccttaaaatataaacagataattttgctagtataaatcctatagctaacccaaaagctatttgttttattaccattggtgcaataagttctaccccagaattattcatcaatgtcaaaagaattagtgtcaacatatacgctattgggtcattacttccactttcaacttctaataatgatgcaagtgaaccccttaagtttagtttttgtgaacgcaacacagcaaacacagatgcagcatctgttgaagctgcaattgccccaattaataaaccttcaagtaaactagttcctattaccatgtggcaaaacatacctgtaaccccagacgtaattattacacccagtgaagacattaatatagaaggtatagcaacaggtttagccatattccagtttgttccaaaccctccaaaaaacattataaatattagtccaatagaacataattgttttgttaattcatagttctgaacctcccatgactaaagtcacagagttcctgcttcatagaattttgcatactaaaatatgtcttactaattctccacaggctatccccatagttcctacggttcttacataagttatttattttgaattgttattagtcttaatccttcttttaatatatttatacttgcatttatatctctatcgtgagtttcattacaactaggacaaatccattctcttatatttaagttcttcacttcctcgtttttatacccacatttattgcatatttgtgaacttgcaaagaatttacctacctttacaatttgtctaccatgccaattagccttgtattctaattggcgaataaactctgaccatgacacatcagaaattaagcgagatagtttacaattcctaatcatattctttacttgtaaatcttctatgcaaataatatcattctcttttattaatttagtagatagtttttgtagaaaatcatttctttgattagctatatgttcttgaagtcttgcaacttttaatcttgctttatttctatttaaactaccgattgtctttctcgataattctctttgtaatttagcaagtttgtttaatgacttcttaagatacttaggattttctataaattctccacaacttgagatacaaaattctttaattcctaaatctaaacctatctgattattagtattttcaaatgcttcaatgtctacatcagtacagcataatgatacataatatctaccacttggttctttagatatagtagcattaggtattctacctttaggtacttgtttatcccttatcttaaccataccaagtttaggtagttttatatgttgaccacaatacataatgtttccatttgtaaagttagttttatatgaaaatctattaattttctttgatttaaatttaggaaatcctgccttttttttaaagaatttttcatatgcattatctaaatcttttaaggcgttttgtagtgaaaatttgtcaggttctttaagccactttaattctttttttaagttagtcaaatcagaactacactgtttataagcaaaagtttctttatcgtttttataaacttctattcttttagcaagatacttattatatacaaatctacaacatccaaaagttttgttaattaactcttgctgttttttatttggatacattctaaacttataagctttttccactactgccacctcactttacttgttttttctgattattaatatattttcttatctgctcctctgtattttctgatacagtagcaacgaaataactaggattccaaagatgtctccccataatactggatgtctatatttgacatattatatgcatatcctctaccataagtaacttccatttttcatcacctattataatattaaaatatgcaattacttaaaacaagtattttgaaggttttttatatttatttttaaataacatatataagaacggtaaatcttaacttttatcatttttgaggttgtcgttcacataagttcgctactacctatgcagttctcttatgaacttcttacactttcatgtaagcacagactatatcttatccttcggcattatccgctaaggtctacccacttccactaccaatagcttgtagtgtacttccctcaagaggaatagtcgttgaagtttctcctattcggagcttacctgctgattgcccattttaaagtacttaggatttaaccttataccatctaaccaattttttctactttcgtaactttcacacttaggtttatttcatccttatgttttagtttggttagctttaggggtttccagcaattcaagtagtattggataggttctatcctatctctacatataggtttccctatatgctgactattttagctactaactcatgactaaagtcacaagtgtgcgtagctattttttaatcaaaatagattcctaccattccatcagacccaaataacatccctagtaagataaaaatcaataatattggtactccaaatttatacaataccttgctagaagttatacaaatcaatagtactaacccacttataatcattaattctgtcatagcatcaactccatttcatataaattttgtagattaatttgcatctacaattttattacttattcaaatataacatgacataaattttataagttatggtacataaagttcaacaaaaatttcacaatacattaaaatgtgagtgttatacttaaatttatatatttgttttaattatattcatttaatatttataatttgaattttttttattaatatttcattttttagttgattgtttaatatatttcattttttatagtaattttatatataactacgaaatataaagtaattagataagtaacaagaaactaacatgtaatgttaggtactctagatatgaaatcttaaaacttttaaatattgaaatatttctttatatatattattgtatatttcttataaattattgtcaatttattttttcttaaaaataaaataattgcataatttatttcaaattatgcaatttataaaatttattcccaaaactcttttactgtttcgattatctcactataaggcaataaagtcgcttcgattattgatttatttgtcttttctaaataatacttaatcatataatatccacaagcatatcctgcacaataaggcaaccctactggaaaatatccttgcattttagctatatcatcaccataaagataagatgttatattttgaaatccagtttcttttaaagcactttttattattggctttatataagtatttaatgtttcgatatctgttctactgacccaaggtcctaacatttcctctccaaacatccatgttgcaaaattttctgcaagaccttcatttatcatcatttcttctaatgttatattattattccactctataaactgaaatctaatattgtgattacattcatgtgctattaatactggtaatctattgatagtatattcattaggaaccaatgatagaaatatatatccaggaatcccaccatcaccccagtatccatcacttaatattgtataaggactatttggattcgccaataatattgaatatttatagtccttaatgtttaaatcatacccttcttttataaaagcatttatagagttttctatggtttctttgcaagtgccccaaattttatcagcagataacacatttatattctttttttgcttttcatcaatatccttaggcgataaaacccctaacatttcacttgctataattacatcatatccacctttctgtctagcaactattggaacattcatacacttccacttaaattcaaaaggcttcatcaattcatatctgtatatatcttcttttttgtttattggtgcatccattatcttcttgtatattttatctgagcgaatttctataatattcatatttaccatctcctttaagacaaagtatatacaattacgtagcgtcaatgtcaatatacattttttataatgtcaccttaatctttttattatattttatcctgtaaaccttccgtacatataacatttttttaaattaataaatttgtataatataataataaaaaattatatacttcaaggtttccctatgatacaatttactaaatcataatttagattatcaggtgcaactataaattattctatatcaaggaggatatattggtcatgctaactccatatttaatatttaatggtacttgtgaaaaagcatttaatttttatgctgaggctttcggaggaggaaaaactatatttgcgcgattagacagcaatccaaacaatcctattatgcacgcaagtgttactttcacaaaatacgaaggttgtataatgggtgcggatacagacaagcctgttgtaatttctggcatggcgatttgtgttgttctaccatctcgagaagcgatagaagaaatatctgtaaaacttgccgagggtggtacacttgtacaagaatttttaccacacccaccaccacatcaaaatgatggcgctgctgaagtacttgataggtatgggtatacttggtatttaagtacatagtaaaaataaaaaaactacatctaataatcataatatagaacagataaatttcaatttaatagtgtagtaaaaaagtcgtgtcctaagactgtcacgacttttatttgtataaaaatttaagtaaatatttttgcgaataagtgagaagtataactttaaattaatttcatatgtagtattggaaatgggttaccttgtccatctatttcagacctatcaaacactttaaatcctaagtgaatataaaatcctacagcttttttattctgctcatttacatcaacatattttacattgtatttatctatagcatattttattaattttttaccaataccatttcctctatatttatcttctataaagagcatctcaattttatctttatctattcctataaagccctttattatatcattatcttttatacaaactatattttctacttctttaagtccaatttcaactaatggtatcaaagattcaatatctttttctgttaaaaaatcatgcgttgctcttactgatgattcccagacttgcaacatttcgtcatattctgttgaatttatttgtttcatttcaagaattattccagatttcataaaatttcctccctatatcacttttaattgtataacacttttttatacaaaacttagaaaggactacgaaggttaagtatcatagtcctaattaagtttaaatattatctattatatatttttaacatttattatatactataatctagcaaatttactacaataatccatatcagtttatactaaaggtgcttctatttgagtagtaaaaaggaatttatgacaatgaccatcattaacagtagtttctccacatattaagtgaatgtgtttatcagttccaggtattctaattgctggccctgttgtaacacatatcttatggaaatggtcaaggaaatctacattatcatttattttatgaacatgatttgtacctccatttattggtatagcttcaccagtaacccctgctgcacggtggttatgtctatcctcacattcttctgctaacttaacactttctgaatattcatgaacatgtgtcatttcctcataatcattatagcacttgttgcacttattgtatttataatcatcatacacataatctctttcacatttataattttgataactcatttttatatctctccctatattatattaagaaattcttgtaaagaatctctaatgtataatatgaattaaagtcaaaaaagttcatattttgtaaaattatgtattaatttaattatttctcccagtatttagggcgtattagtgaagctggtaacttcgtactagaatctccttttgcagtatttacttgcaattgtgttaaaaatatactattttcaagattagcacctctaatatcacaatctcttaagtctgctcctattaaatttgccccactcaaatctgtacttcttaaatttgctgctattagaaatctacctcttaaatctgctcctattagatttatttttctaaggtctgctcctattaaatctatatttttacttaattttttcatatttttaagagtagaagtcttgataaatgatttaacctttcccatcacagactcactcgcttgtgataataataaattaacctttgttctatgtgatatgatatccaaattaattatctgttctgggctcatattagttatcttttcagtttcttcaattatcaaatcaatttttgatttgattgtatctgatatatttaatacagatgcttctttaagataccataacatttcatgtaattgtctcataattaaaaacacttcagacatttgatttgttaattctggtgattgcatccagtctatccccttatatgttacttgtgctactttttgacctgaaccaaaacaatcatatgcagtacaccctttaaaacctcgcttcataagactattatgtacagaacatttaaaatctggttgtaaattaatacagggttttcctgattccttatcgataggaaatccatctgaagcagaaaaataaagagctacacaacaaagtccaaaacacttcttacaatcaatctttagctcctcaaataacttattatcatatatatttttatgtatatctatcatattttttctcctcttaagctttatttttaatattatattatctataactaaatgataatcaagtcccttatttaacagttcttattcttaattataatttaaggtattatttattccaatagcatacataagtttctttatacttgtaacaatacctttatactaagacttattttaaatgtagcactgtaataataaattgtttatatactcataatgtatttgataaattgtaaatctttatagaagttgaaatttttaatgattttagaatcaagatataataataaatacaatttataaaatcagaaatatataaattaactatacaaacctaaataacatagcatttaaattcacaatttcagtataaatagtacaaagtatattaatttaaataagattggcttatttgtagaggagagaatattttggtgttcaataaaatttatatttaataaaaccataagaaaatataaagataaataaacaaacttttattacttaatagattcttatggttttatactgtactgaaaaacaataaacactacagcttatttataatattacgcttttttaacaacagaagactttagcttcatagctccaaaaccatctatcttacattctatatcatgtccatctgatgagtcatggattaaacggatatttttcacttttgttccaatctttatagatgatgaacttccttttactttaaggtctctaattactgtaacagaatctccatcatttaatacatttccatttacatctttgataatatttgaatcttcttcagctcccaatcctaatgcccactcatgagagcattctggacaaactaaaagagttccatcttcataagtatattctgaattacatttcgggcaatttggtaaattttccatctttatatgtcctccatttgttatttttaaatttcttattatataaaatttcttttgagcctttatgatatcatattatacttatatttacaaactactaatttacttaatgtttaaattctattcgtattattattaaacttgatttagctgtaatctctttcttatatttattatagttgatattattacaattttataactctatctgcctgctccgataactctaaatcatgagttacaaatacgatagttttaccattcttatttagatttttaagtatatcaaatactatgtctctattttttttatctaaattacctgtaggttcatctgcaaatattacttcacattcttttaatattactcttgctaatgctaccctttgttgttctcctccactcaattcgtatatcttttttttattgtattttctaagacctacagactcaagtgcgtaatttattttttcattatggttgatatttttttgatactttaaagcaattttcaagttattttcaacattttcattctcaattaaagcataattttgaaatagatagccataaaaatccctttgtaaaattcttatctgtttactatttggattttttatattatttattataatatcaccagaattaggtttttctaataatcccattatattaagtaaagttgtcttacctgaaccactatttcctgttatcgctacaaactcgcccttagaaatttctaggttaaatttgtctattatagatttatctttaaattttttagatatatttattaatgaaatcatctttttaatgttctccttttataattttattaaatgaactatttgagataatcttgtctaatacaatagatacaattacttctataactaatatcagaagtccaaataagataatattattacttaaatctactcttgttgatataatgcctattggaataatgtttgttaatattaatgagactattaacaacatacttctagctgtagttgaataaccaaatatttttttaatatataacttatatttatttctttcatagtagctagctactatattgtaggtaatcattaagtttgatattgctattattattatagtaaaaatttcactattcaaatatttttctagtttatttatttctaaaccatactcattataaacagcatgtaaactttggatatgcgcttctacaccttgagcttcaataatgttacttatatctgcaagggcatctaatttcttagaattaaaatatacacatctagatatataagaaagataaaaagaatcatcaatattatctatgtcaattattgctattgggtcatcaatgagattcctattgtcatccataacaagggagttataagtaaaatagctttgattattatctacatatattatattaacatttaaatctgacttctttgttttatttaactctctatttaactctttattgtacatattttctacttctattttttcaaaataaaataattctctaaactcttttttaatctcattttcatgtacttgtaactttttaggaactaataaatttatagtcttatcgtcataatcgattagattaaatatttctttgccatttgagtaaatagggttaactttaagatagtttttatttatttttatatttttaccatattgacttacttctgggtttttaccctttgaatttatttcatacatgtaacttccatcttcaagtttttcaaaattagttgaatctattaagaaagcatctttttcttctaccaaatttttatagaaacctttaatcttggcatttttaattacttcttcctttcctaaagattgttcgcctgtatctttaagagtaagattataaacattttttgctttatcccactcagatagatttcctaactgagtttgtagcatattataatttaaaatacagttatttatggataatataagaaatgatacaaatacaattttcaatgtgaaatgcattatatttacaaaaccataagatttttttccatttagagatagcacatatttagaacttctactattaaaaccaactattaatatagatatcaaaatatttatcaaaatacatataatcgaaaacatagcaaagtataagcatgctctaacacctatatttaattttaaaatatagattatatatattaataatgctgtgacagatgataaaatcataattctaaatatattttttataaccctagcaattatatctagcttagagtatccatttaatcttaaaatagaagcctctctactcacactaattgaataatgtattattgtagccaagaaacaaaggataattagtattaaatctctaattattgaaggatttaagtataaatttgagttaacatatctatcatgtaatcttgctacaaaaatacttctgtctacatttagttctcttaatattttatttattgtatcttcattttgagttgaaatatataagattcctgattctccaacttcacttattttaccaaaatccctaattaaaattgatatgtctttactcatagttgagaatttacctacttgattactattattactattattagtgtttatattactaataaattcatttgaattagtattaggaaattttcctgattttaactttatattgttattcaaacttgtatcagtcgtatatatagataatttttcattattattaaaaacatactttgatatagccacattattttcatctgcaatatctttaatccacttactataatttttatttaactttttataatctttaaacattacagatatacttgttgtatcgttatataaaatattattaatttcattatctttaactatatttagacctaataaagatactattaatagttcaattgtaaataatacatatattatctttttcaattatagctccctcctaattgtttttattctaaaagcaaaatatattttactttagttaaagtataatgctttgtaccttttctaaacaactactatattgtcacattctaaatggcaagtgtctatttcgtcacaaagataaaaataaccttaaaacagttaattttttataatcaactgttttaaggttattttttatttttagcaaacaatattttaatagtggtacaaaattagtataattcattaatatagattctagtatttttagcaatcaactaaaataatatcttatttaaaacaaaatttaatttaagttcaatataaactttacctcaactagaaaatatttcttctaacttaggaattaatgtgtggatatctcgtcaatagaaaactaattcatcctccatgttaaatttctcttatatttttaatgatttcacgaatctttttggcattttcagtaatatcctcaatagttcctttagttaataaaccaccaaatccacatacatcaactccattttctaaccatatatgtaggttttcaagattaattcctccacttgctaaaactggcatatcaggtattggtgtcttaaatacctttactagtttaggtccatagaaatctgatattgggaaagcttttataaaagtcgctcctaaacttagtgcatctactgcctcagtcaatgatgtacatcctggagcataaggaatctgatatctattgcaaatcttcgctacaccttcattgtaatttggtgcaataataaattgagctccatgtaatatagcatgacgagctgtttcactatccaaaactgttcctgctcccacacaaagtatttcaccatactttttattaagcccttgaattatttctccagcattatttagggtataactcatttctataactgttataccaccttttatacatccttcagcaatttcacatgcacggttaagattttcttctcttacaattgcaagagccccacattctgacattcttttggttatattcatctttttcatattatcacctctatactcatcaaaccactttacttattcattaattttagtcatgttttataatatatatattaattatataccagtgtaatttccctatttatattatctattctcactacttttattaagtattgtcctataattttcaactactcgtttaatttcttcaagtacttccccagttggttcagttacaggaagtcgtgcagttccaacattaattccattcaagacaatagttttcttcataacagatggaattgttccaagttttagtatacgtcgaagttcttctatactactttgagctttttgagcttcttccaaatcccctttcataaagttttcatagatagaaataccaatctctgtgaggaagtttgttgttgctgcaacagctccttgactaccagcttttagactatccagaataagtgaatctgagcctgaaaacacactaaaattctcattctgcgttacttcaatataagctttcatgttgtcaagtttaccactactatccttaattccaacaatattctttatctttgataattcacgtactgactctggttcaatattaattccagtcttacctggcatattatacattataataggtaaattaactgaattagcaatagttttgtaatgtaagattaattcctgttgtgttggtgtaacaaagtatggtgtaataatagataatgcacttgctccaatcgcttccattctcttggataaatctataacttcacgagttgaattaccacctgttccaacaaaaacaggtacacgattatttgtatgattaataacaatctttgcaaattcaactttttcatcatctgttaacacatgacattcaccattagtacccaaaataaataatccataaatccccttttcaatcaaataatcaattaatttacatgttgcttgtgaattaatattttgcttttcatcaaatggtgttatcattgcacatataatccctttatatttcataaaattatattccctctctaatagactttccaagacttcctgctggatgccatttcaaatactgctgtgtattaagacctttagcatattgtaatacaacacttaatgattgtaatactattgtttcagctaaaattgaagcacgaggagctttattaagacaatctccttcctgtttaacgcctgcgaacaggaatatatcagaaatattttttaaaaatgaactctcattaccacttacaccaattatttttgctccatttacttttagagtcttaagagttgcttttaactcttgagtttcaccactatttgatattgcaataacaacatctccttcaactacttgaccacttgacccatgtactgcttctgtaccatgcaatatatatgctgatgttccagtagatgaaagcaatgatgaaatatatcctgatacatgtcctggtttaccaataccagtcacatgtacacgtccgtgatttttttcagcttcaagaattaattcgcatgctttatttatagatgtctcatctattgaggcaataaattctgacaattcattagatatattatctaaaaattcagataatgtattttccataagatgtatcctccttgaaatcatagtaactatgactatacttttatataatttagtttaaataggttttataaattgtaaaatattatgtaatatcgaaccaactacgttgtaatcaatattagggaaagttgctccttctataccaagagtcccataaactggatatagtataactggtaaaaatgcaagtaataacccaacaacaaatgacccagcaatagcccctctccatcctcctgaagtattgccaaatattgcagctgtacctcctgagaagaaacatatgtgagcagctggaataattactacaggaaatatactaggaaatgatgccataatagcaattgctaatagaccagcagcatatgctgatataaacccaataataactgcatttggtgcatatggaaatactgttggaacatctagcgcaggacgtgaacctggaatatacttttctgaaatgattacaaatgctgcagttatttcagctaagaacatacgaacacctgacatcaatattgacatacctgccacaaatgtaaatgcctctataagcggaaaaaccaaccaatgtgttgaaccagcaatttcttgagtaaatgcttgaccagcttttaatgttgcaatatagaataagattaacataactatggatagacccattaagaagtctctgaatattgataaccacttaggaaattctatagtctctgttgtatcatctttatgttttgaaaataaacgcccaatataacctgataaaccataaccaatcatgttaaagtgaccaatagcttgttcgtcgccacctgttaattcacgcataaatggttgacagaattgaggtagtgcagcagacataaaccctaagatagttccacctattaaaatagtgattgtattatcaaatccatgtgctttcatgattaaaactaatacacaagaaaagaataaactatgacctgttgtaaagaaaatattcttaaactttgtaatacgtgcaaatactaaatttaatatgaatccaagaattaatgtacatgaaactgcaaaaccatatgtaccttgtgcaagtgctgtagctgcttctggtgaagctataacaccagtaattccaaagccatgttggaacagtttattgaaattttgaagtgctcctgtcatagcagaggcaccaataccaaatatcaaaaaaccgataagtgtttttgaagaccctgtaaatacttcaacggctgatttcttttgaagaatcaatcctatacatgcaactacgccaagcaaaacagcaggtgtactcagcaaactaataataaactccataaatattcctccttatcatattaaatttatccctcttttgaagcaaggaatttttctagtgctgtctttatttcattacggtcaacaatattgtgaatcccaattatatcaaacttcaaatttttattttttaattcttcagcaacatcaattaatgtttctacagcatctccattgaatccatttagtgaatccaatgaaccatgttctacttcaattggaaagttattttccttaataatttgttgagtctttatttttaacattaaacttgagccaactcctgctctacatgcgattaaaattttatacataattaaatcctcctttataattcgtgtgtttttataaaatcaataatttctttagcctctttagcactatctaaaaccttaaaaaactcatcttcttccaatagttcaactagctcagacatagcacgtaaatggctattattgtctattgcacttagacaaaatacatattttacagggtcgttttcgttattcccaaactcaataggactatctaaagtagcaatgcctattgcaatctcttttgacccagcttctggtctagcatgtggaagtgcaacatgttttgtaattactatgtatggtccagatgcttttgctgagttaatcatagcatctacatacccttcagttactttgttattttcaactaatacagaagctgactgtctaatagcttcctcccaattcttagcttttacctttatttttactagtgtttcattagtaatctcacttagcataggcccctctccttccttagatgtaaaattctctatctgtgtaaaataagctaatagctcacttgaaagaatactttcagaggttacatttgcatatttttttattatatccataacctcatctattttaggttgtcttaaataaatatcacctaattgaatatacacttcacgtgtaatcttatatttttcttttgtggtcataacagggcttactttaattactggtacatctgtttttaaaccctctgcgttataattagtagtaaatacgatatctacaggttcacttatattttctaatccaactgattccgacattggtataaagtgtaagtcaggaaataagtttgtaagttctgcatgtaaaatagctgaactaccaacgccatttgaacaaactattaatgctattctttttctaaaaccatcaaattcttttttatttgaaaaaagtgttgcaaagtgcattgtaagatatgctaactcttcttcctgaatttcttctccaaataatccgcaaaactctttcattgcattacttacaattctataaactaatttatattcttcttttactttttcacaaatcggattatagataggtaatttaaataaaagtctatagtaggcaggtctaaaatgagaatataattgtttaaatattttttcttggcttatatagtaaactccgcttaaatatccaaactttgtcatcattttatttacaatttttgaaattacatccttatcttctgtatcttcttcataatttcctaccgatatacctaaaatccaagcactaatatacattatattataaggctttatcttatcctcactcccatatacttctaataattccttagcaaatttatactccttcattgaactcataactgaaatattaggaatatctacattttcctgagtaactattctagttgaatacatccttgcttttagaaagataaatatatatataaattctattaatctatcttcaacaaaagtaatttcatatttttttattagctttaatataatttttttagcctcttcaaaactatctaaattatattctttaataaaaatatcaaatactcttgaacttttctcattagacaaagtttctataatgtttttaataagcactctcctaatttccatctcattgccaactatgtaatatccatttatacgattgttcttaactttaatgttcttcttttcaagctctggtatcaaatccttgaaatcaagatttacagtagacctacttacttttatagaatttataaaatgattaattgaaatatcctccatgttaataaaaagcattaaatacatatataaaagtctttctgtcttactaaaataataagtattcttagaatagtttttttctaaaatttctttaattgctttttttgtttcttttctaacgataatatctttatcagctcttaaacatataagtggtacattttttactttaagcatgtcattgattttatttattctataagtaatttgtctctttgatgaattagactcctcttgtaatccattagttgtaatcaatgtgctatttaataaaatctggagaattgatacaatttctttgtccactaccattaacccctactttcttattaagattagtcttcatattatcattggattctttcatcacctccacaatacttattttatttgagaattttatcgttttcaatttcatttaagtataacttttgttttagattgagacaaaaattaaacttatctaaaatagctactatattacacttatagattttataaataaaaaagggttccttatgtaaagaaaccaaaaaaaatttatttaaagaatcaaagcgatactaattatgcataaattaccataaataaaaggcacattaatttaaaataaaattaatgtgccttatttataattctaatatattaaatttattttttaacttgtagtttaatatcctttttcttcaattaattcatataaataaagtatttaataataaatgttccttatgactttaatattttaaaccaagaaagttaaagtttctctcatataataaattgacacttatctatttcattcttttaagtgtacaataagtcttcttctagcagtaagagtaagtacttcctctacttatcacaaactataatttttatctcattggtatatatccacgatactgtgagtatgcatccatagttgctatatcacctaagaatactgatgcgatattgaattgtggttttaaatatgggaactcctcttcttgtgcccattctggttttttaataaacgactttgtctcttcaaccacagctttataccattcctcttccccttcaaaccatagttctgatacacggtcaaaagcagttgctccataattaatcattattttactactgacaaaacgattaacatagcaacagtttgtaaagtatggcactacctcatcatagaaccatttttctccttcttctttagagataccatctggatacttaatcataaattgccaacgatagtttggtccatcttgtacagtacgtccttttcctctaaagtcttcttcccagtttattggaacaaaagcaaatataaatggtgggcatccattatctccacctactgcacgtcctgcatctccactttctgcattttcatgaacccttttattttctacatctggtatacacccttgccaacgtagaacatccataggcatatattctgtcataattctatttgccatctcaggcatatgttcatctacaagccaataatgttctgttagttgcatcttacgtgcaccaaaacgctcaccttcatttggtgtaggatatgcttgataaaaggcatatttagtacaatatggtccaaaagtgctaatactatctggaatatggtgacgatataaccagtccattaacttaggtctatattcttccttggcaagtcctacatatattaaacttctcattattttaaattcaaaacccatagccattctcctataatcaaagtatattcacatgctttcaatttccctttttcttatctttactcaaaatatatattgtaaacaaatctacacctgcacccacgtaccatactcctactgccatagctacagcaatttgaatacaaatatcttgtaaattaataatattttcacctgtcataatagttagacctatagcccaaccacaaagccatgatggtaggaaaattattttttcaaataaggatgcaattacaactgcaaaaaaacctaatatactaagtgttaaaaataattctaggttttgattgaaattcatatatcccataattaaaatggctaacactgcccataaatctccacaccaaaaaccaaacattatttttaatccatctttttgtttattaccattagttacatataatcctgcacagattagtgctacagctccagtttttattcctatataaggtgctaatactgcccataaaggaggtagtaaagcaatccccatagacagtgttaatatttcttttttctttctatccatttcctatattgtaattagtagcttccctagcttgccttatctccaatagcttaattgctatttgatttacaatcatagatactgcaaaataacttaagtataatggtataaatataacaataaatgctggagttaatccaatcttgtaatatgtaagtaccaaaaaaataactgctaaaataatttcaatttgtttaaaacttggcttttcattcatacaataagcctcctataacatctaacatcccttaaaaaagagtcttagtattttaattattatcctaatgaaactccagcttgcttttctttagttaatggctctataaaattataagatgtttttctttctttaaattcttgtgttttacgaacttctgcataatgaccttccattttcttaatatcatcaccatgtataaacttacctggtaaagtatcatgagcatgacctaattgctcttctggaaaactaaatatagtttttccacttatagtatctaactctccaactataccacatagagcacaaattgcctttttagtacctgactcaaggtagaataatctattgtggcaatgtggacatacaccttcttctccttgatatgaagctttttcaaaatcttttgctgcttcaactatatttaaaccaatttgatgaacttgaacaagccttgtatcatccattactaattcctttgcccatgggaaccaagcattatctataactttccacattggtatgagagctagcatagcatgttcacattgaactcttgtaccccagtcagaacctcctattcccataaatgatattactttatcattaagcattcttgagtctggaatttttcctcctatagcttctgcaacttttgttcctataatgttatttcctctatctgctctgggtccaaaacggtccattatagtatggaataatcctgatgccccttcttcaaaaatagggtctgaaactactataccatctgcatctttcattttgtcaagcaaccattcaaaatcatcttttaatacacacatactacctttcccggataataaagttttaacgcacgcacaacatccagtacaatgtttaatgttaatagatgacatttgaataaattctacttcagcccctgcttctttggcacctttaagtgcaactttacacattgtgtcattatttccattttttgttccaaaagaaatacctagtattttcattttcaactctccctctttagtatttatttaatcttctttcatttttaatatatagaatccatcatctaaagcatctatgatgatgtagcctctatcatcaacgataagatcttctgttactgccaagcgtggtcctgggaatcctgggaaataagattcttctggtgttttatttggatttggtggtataaaatatgctagctctttgatataatatgggtctgatacatcataaacccttagccctgcatggaaataacagcaatatactctatctcctctttgctctaaccatggcttattatccattggttcatgaagattatgtggaccaaatggccctgcttttcctaatcctgcaacattaaagttaggataagggaaatcttttggaacttcaggatatgggaattgagcaattaatgttggttttgttgggtcactaacatcaaccatatgtatattattcatagcttgaacatctgtaatgttatctggtttaaagaactggaatctttctccctcattttgaacaacgactaaatctcttcctggcaatggtaatgctgtatgagttcttgcacctgcaagtctactagaaaatgcaggcataaatggcaattcacctaagcatcttggtcttgttaaatcttcaacatctaatacaactaaaccagctcctccataaccacaatatgcttttccgtctcttacaaatggaggtccatgaagccatcctttatccataaattctgggcaatgaggtgctcctgcatcaaaagttctatttggatatccatctgcatattggtctggtctccaccatttacctatttccactggattattaggatttattatatctatgaccctataaatcagaccttcaaagccaacacaatcacttgataaatgtacatatcttccaccattgtacatgaatctatgaacacccattacatgctttaagccacaatcccaatatcctaaaaacttaggatttaaagggtcttcttttaaactgtatattctaattcctgcttcacacttaatatttgctaatttagcttggtcaacaagtgctcctggtccacttccacaactcattgctactatcattaaatcatctgctatttgaatttttggagttgttgttgtaggatactctttagggtctaacatttgaaaatgttttataaattgtggattataagggtctgtaatatcgctaatcattactccattttttttatttcctccaaaacagcatccatataaatagtatttttcatctcttttgtacagagccatttgaaacattccacaagttccatctaagttattaaaggaacaaacttcaagatttttaatatatccgttatttccgttgccttttgcataaaatttatcttccattttttctcccttcttatttaaagtattatcaattgatatactttcattttatgagacaaacttacttaaatccaatatcgttttcattggaatatataagttattcttattaataaatttataaaatctaatgtaaagatatacttaaaacatatatttttatacaaatattttctaatattctttaaaagtaaattttcttatactataataagctttaattatagataaataaggtttacaaacaatcaagtttaaataggggtgattatttgaatactaaacaattagaatattttatatctgtagcagaaaatctaagttttaccaaaacagcagaaaaattttatatttctcaaactgctgttacacagcaaataaaagctttagaagaacaaataaatgtaactctatttacaagaagtaaacgtcatgttgaactaacaccagccggaaaagtttttttatctgaggcacgtactataataaaaaatatcaatgatgctattgcaaaaacacaacaatttgcacatggtttttttggaactttgagcattggaaccttaataggatatgaaaaaaacaaacttcaacaatacttaaaagaattttctaatacataccctaatatatctatggatatttgtactaatgaaataaccgaacttttaaacttagtaaaaaataattctatggacctcgcttttgttattaatccagaaaatcaaccattaaaagattttgaatataaaactgtagaaagatattctttggtagctcttttacctcctggtcatccactttacaatgaggattctatcgatttaattgaattacaacatgataaatttatttttgtaaaagaaacaggggatgagtatggacaaaagtcaatgatacaaaatagatatcgtgaagcggggtttgtacctaatgtggtacaacgttcaaataatcttaatactattgaatcattggtatcttctaacatgggaatatccattttaccttcattttgtgttacagatacaatgatagaacgtgatattgcaatagtacctataaaagaagtagaaaatagaattgaagttgtggttgtatggaataaaaaaaatacaaatccagcattagaaaagttcatttctataatataaaattaatcaatattaactataaaaatagcattaaccatttttatatggttaatgctattttctactattttattatctaacttttaatttaatatttataatcgttaaaaataactctgtttaacaaatataagcaagtcaaaagtgtgtctaaaaaagataaaaattttattatatacaaatgtattatctcaatatatctattttttcattgttcatcagtctaagtacatgacctgtgcttactaaagaattatccccataagttgtatgagctaacaccgaactagcaaccccaaactcaactatatcttcactcttcatattttccaaatatgaatatataattcctgccacatatccatccccagcaccaactctgtcatatatttctaacttatactccctactttcaaaataaccatcatcatttgatatatatccctttataaatctattattcatatcatcaaatcttctcatagttccagctacaatatctatatcatactcttttttaatcaattctgaactagattttatatttagactatctatattaagtatcttatttatatctctataactagcaaacagcccatgacaatatggtagtattttcttataatcatttactaaatcatcataagtcctttctggatttaatgattgtctaaaattaaaatcaaagaatacttttatccccttttcataagattttctagctagttctaaagcaatctttttaactgaatctgtaagttgcatagcaataccacaaatatggactatatccatttcttctaaacatttatcaatatcataatcttgtaatttactctcacaaaatgaactatttaacctattcaaataagtcacttcagaaggtctttctccatacccattttcaagaaaatacactcctatatgattccctccatatgtgataaagtcatcttttactccaagctttcttatatttgcacttgatgctttacctacattattattaggcaactttgtcaacatataggtattgtatccaaagtttttaagtccagataatatatttaatcccgtgcctgtaattatataatttagttcattggtttgtgttaagaacttgtagtcaggtactgaaagtctcatcattatttcaccaaaagctaatatattcataaatctatcccaataattctttcattattttataaagtactcctatatcttccactttcgtatcacctgtttctttatcaattattgatgtataaacatgaggtataactttttctacaccagcatcaagtgcaatttgaactatctctttgaagttatctaagtctataccccctgttggttctaaataaaaattatgctttgcacaagcttttgcaacttctatatattcatcctttgttttaagccctcccattggaaaaaacttaattgagcttcctcccatatctttcatcatagctattgctgtttctataggaactataccatctttttcttttgaacttaatggacctgtggatatttttacaaatcctggtttaccagttggagaaactaatccatttattatactatcattttgaccaagcaatgctctagatgtagcgacacctgtaaacacttgatttatatgttgtggctgaagttctttagaaatctgagataccatatttgactgatttgggtctccagctccaagacccacagatattgcattatctatttcctttgagtattttttcatatcttcaatagctgcttctacagtgctataattctttgatagtactcctactagtacatgtccatcacaggcatcatatacttctttagcattttttatgcttcctgcaagaacatttaaacaaactctatttttataatattgtggtatacaattcatatttatcccctccattggtaaaattcaatttattaaatcattataatgtcacttactctacactctaactttctactatattttttatcctattataaatattatctaaatcacttccagttacacttcttatatcaatctcaatcttgccttcattagccttatagtctctagtgtatatagctatctctccacttctaagttcatttataatttgttgtgttgacttatttattatatcttcattaaagttaatttctccacgaagtatttctctacctgctgaatctctagttatactagcactcactccctttatagtatttatcttgtctataaatggatttagcttgtcctccatttcttttaaagttactttatcattacttatatatctctcaattgcacatgttagacctacaatattttcttttcctattttcatagctcttcctataccctttgattgaagctttacattatctatgtattttttcttacctattactaaccccgagctaggaccttctatagccttagcaccactgtatatcactaggtctgctcccaattcataatatacatttaaatcttcttctgctgctgcatctactatcaaaggtaaattatattctttagcaacttgtactgcatctaatacacttagcatactcttttgaacacaatgatgagatttaatatacataattgctgctgtattttcatttatctctcttattatatgttccttgttacacatattagcatagccggcctcaacaacttctcctcctccaagtcttatcattacttctactggaactccataatcaacattatgcccctttggaattattatttcccttttaacttgtttcttaggattatttacattgtaaactagactcatatcatcttttgctatcattgctcccacactctgtgcaatcccagcagatgcactagaaactattagtgcactttcacaccctaataaatttgctatatattcacctgttttatttacaagttcttctattataaggaaatttttacacccttcacctattgcttcaataacttccttatctactgttgatactcctagtatagtcattttgcctgaagcatttataacacgtcttacagagtatttttcaaatatactactcatacaatagtttctcccttctactcattctcttctatagagttgcctatatttaaatattctccattgactactactgctcttggctttatagacgtacttgtgattactgacttattcaaagaatcttgaagttctttttcttcattaaccacatcaaatatagttaaatcagcatcatatccttcttttattaaacctttattttttaaacttattgcatctgctgcatttttagtaactttatctattatatcttcaagtgaatagcccatatatataaacttttccattgttgtagatagattatacactggaccatttattctatttttaatatatatatctgtacttatagtgtctggaaaaattcctgcatccttagatttcattgcaatatccatactaaaactttcggttccatgacctacatcaagaattatacctctttctttagcttctatgatttcctttttaacctcattgcctctaagtattccatttggctttccattatatatatgggttaatatatctcctttttccatataatcaaatatatcctctatcgttggaggagaactcccaaagtgaaccatcataggtagattaagttcattttttattcttttagctacttttaaaggttcaacatcatttgaaattacaacacttttactcattctagctttgattccaacaacaaaatctttgtattttctaactgcatttttaagttcatattcatcaatattcatcatatttgaaagttcatcttgagatgttattccctgcttagcaatatttattaaagcatatacattggtcttatactttttagtatcttcataaaattcacctatatctaaagctcctgttgttcctgcatctactacagtagtaactccactttttattccaacctcatctggataatccttataaaggtctagtctttcgtagcagtgtgtatgtatatctatccaacccgcactaataaatttctctccatctaagtttataatttgttttgcctgatacttagaatcatctatatgattttttacttctattattttatcgtctaatatagctatatcaattatacttttatctactgtttttccacattttattaatatgtctatcttcactttactctccctctaaaataatcttaaatttactccaaggttcaataaagtctaaaagtattatttcgtcttcctttattctacccaccttattttttctttcatctgtacaatcttgaagtatcaactgtaattcccctttatactttccaaagtcatcattaccaatcactacatctcctcttttaaagatgttcttattatcatgtttagggaaattttctttagcatatttttttcttacttctgtagatcttgctacctgattagttatatctcctcttctaaagtgttgctcatttaccattattatcttttctacttcagaagttttttctttagctactacattaaatacaacttggtattcatttacttcagacattctttttaattcatcttcacttgcatatgcatttcctacaattacatcatcaatcaatcctgttgcgaataagtgcttagttgctgtagcaatatctaagtttctatgcatttcaagcgtacacagtccatcatttatattccaaggtccgattgttgcgtattttgaattgacaaaagcagcagttcttattccatactttttaaatctatttgagcatcttacaaaaaaatcatatggcaagcctgtacccctttgaggataaaaattgtgacaaccatatatattatttacatttggcttgtaagtaattatattatccaagtatgctacatcattactcatatttagttccacttttaaatcatatggattgaaagaaatcatagcttctttacttccatcatatccatagtcaagccttattccactagcatttaactcactaaagaatgttaaatcatcataagatatttgtaatatatcaaatatgtttggagctatatcaaggattacttcaaatcctaattctcttgcataggttataatctctttaaaatgttttttaacttcttccttaggtcttgtaattgaaagcatgcacataaatattcttttaaatccgtattttgaaaccatttttatatatgccttatcatcttccatgttactatgctctggatatactgatattcctaatcttctttccatctttctcctcctcaaattacattatttaaaatatataaaattaaaggcaaaggtcattcctcctaccttcacccttaataacttataagctttttctatattttatatagtacaaaacctctatatctatgtatttttataaattttcactcatttcttcttgttctctttgtaattgttgtttttcaaaaactttgaagaatggataataaacagcaaatgatatcacaaagttgattaatactaagatacctgctagtatactccagttagtactcattactgctgctattggtgctggcattgcaaatggtaatcttgctaccatcataggtataacccctgtaatagtaagaacatatgatagaattgtcattattataggtccaattataaatggtatccctagtattggattcataactattggtgctccaaatattataggttcatttatgttgaataaccctggtaaaaatcctaatctacctaaactttttagatattgtgacttagaaaacataaacattacaactaatgcaagagtagcccctgctccccctatccatacataccactgtaaaaattgttctgtaaatatgtttggcattgcatgagctgatactccttctgtgaatgcagttatattttctgctatagacatgtcccatataggtcttattactggccccattatagctggaccatgtatcccaagtacccagaataaagttattaggaatactgtcagtagcccaccacctaaactatttcctgataagaatccttttaaaggtgataacatagcgcttagtgcaacacttatatcaaatcctaaaatatgtcttattacccagaataacattaaaattactgctgtcggtaataatgcagtaaatgaatttgaaacctctactggaactcctgctggcatcttaattgtaatattcttttccttcataaaacgatatatttcaactgtaattaatgatgttacgatagctccaaataatgatggcgaattaagttttgccatatccatccatctaccagcttctataactccacctactggttcaactacttgagttggaactattgtagaaactaaaaatgccataactgcaagcataccaacacctgttgtatctaaatcgtagcttttagcaagtgatgatgctatcccaaaagtagcatatagagataaaaatcctacagtatatctaaatggtatatctaatgttgctttaaatggagctataaaatccatataagcatcaataggtatgtttaataatattgtgaaaaatgaccccactattgttagtggtaatgttgctattatacctgctcttacagctctcatatgtctctgattacttatcttcgctgctacaggcataatcttgcgctctaaaaaacttgcgaatttttccatagttatccccctgtattattgatattatcctttatttataatgcaataacgatttcataacataaactaatttttatgtaattgataatatcacttatttattaaaaatattataacattataatgtttggttgtaaacattataatgttataatatttttcgtttttacaactaaacaaaaatcctgagcatattatcatttcaataaactcaggattcttattatatttcgtatttaattacgtagttttgtacttctgtattatatcttgcaaatgatagctcaactatattatcattctcatcataggtctttctttttcttcctaataatatgtctttagctagatttagagcctttgatacctctagttctgattcttctataaaaaattcatcttcaaatctagttatatttatatttctcctatataagtacatatataaagaactttcattattaaaactttcaacagttagattttcatcaaaaggaatataatgagtaaaaaatatatatggcttactatctaagtaatacattctagtaatcttgctacatttttctccaaatatactaaatacttgtgaatttgtatcatttattattttttcaattgaaatagtctttttagataacttatgacctttagataaaagtatacttgaaaaagactctgcttttgatagcttattaaaaagactattacttattacttttgtcccttttccactttttttctctacatacccttctgattctaatatctcaatagcttttctaatagtaattttactgactccaaattcttgctctaattctctttctgttggaatattttcatcaattttatattcgttatttaatattttttgctttaatatatctacaacttgtatatataatggttgatttcttaacatgattcacctcttaaattatatgttataatattataacatataatcttatattattaataataaatatttattaactttaaactaaatataaaaagagtcctcaaaataatcctaatgtattactcactaaatattgaatcaataatctaacaattagtgtgctacacataatgtatcttttaagaactctcttaatttattctctttaatttttatttatcttgtaatttcaaatgtaaatcaacgatttcttcagctaactgttgaaaattcataccattcattaggtggtcctgtgcatgtataagtatgacacttatttcagtcctgtttccactagcttcgttttgtattaattctgtttgatatctatgtgctttatttataacttccttagactcttttaataattcttttgctttttctatatttccattcttagcctcttttattgcttcaaaagctaaccctttaccttcacctgcataacctattatattaaaagatatttctataatcttttcatccatcctttgattctcccaatttatatattaaaaatacattataatttatattacttagtgttgttaagttctatcgctctatttaaaacagcttctccattaactgttccatagtgcatcatatttataacctctactggtatattatatggcttagcaatttcttgagccttaggtaatacatatctaacttgtggtcctagtaataatacatcacatttttctatttcattttgtatagttgattctggtattgcccaaatttgcgactctataccattttctttagctgcactttccattttagtaactaataaacttgtagacattcctgctgaacaggccaacattatttttatcatatattttcctccaaatttttattaacaactatataaacattataatgttataatattttatttaattctaccttaaatgcaatatactttcaatacttttttgttattttaatattattaagtgtcaaattagcaaaaaccgtatcatttatttatgatacggttctccattatttatcctataagccctataaatctgttctaacaatatcaatctcatcatctgatgaggaaaagtcatcttagaaaaggataacctataatcagcccttcctaaaacctcatcagaaagccctaaagaacctcctattataaaacagagactactattacctctaactgctaaatcactcatagtcttagcaagttcttcagaggataaacccttaccatcaatagccaagactataacataactattatgctttatcttccctaaaattttctttccttctttgtcttttataatttccatttccttaacactcaaattctctggagctttttcatcatccaactctataatttctaacttacaatacttagaaagcctttttttgaactcatcaatacctaattttaaatatttttctttaattttacctactactactatacttatattcatatatttctcctaaacttaattttattacaaatctatgcattactagaatttacaagctcttataaaattatatctctttttcttgatttgcatattctacaaactcttcaaaaggtattgctttgctataataatatccttgatatatttcacatcctaaaccatataacttatccctttggtctatattttcaacatactcaacaactatatcaaaatctaaattttttgaaagatttacaatagtcattataatttcactacttcttttatttgtaagtatctctttaactaatgaaccatccaatttaactatatcaaagttattattttgaagatatataagagagctatgccccatcccaaaatcatccataattaactttattcccaagttatgtatcgcattgatacgttcaataattatttgtgaacctgataatgcaatttgctctgttatttctatacctaacatattaggatttatatcattactactaatgatattttttatttgctccggtaacttagggtcatcaagttggtctggagatatatttacagagaacttaacaggatttctcaatagcttttcactcttctttaaatcaatacatgctttattaataatatactctccaagctcatctaagaacccttcttctttagccaaaattataactagtggtggataaatgaaccctcctattgaatgtttccatctaagtaatccctctgctcccacaacatttccattataattgacttgtggttgataaaaaagttctatttctcctcttttcatagcaaacttcaagtctgatgccaacatttttgaaattgaacctattttaccattatggtttagaagattaggctgttcacctgttaattcatacctttttaataagtttgttaaattttctatattattcttaaacatatatgtatatctattttgcgacatttttataaacggaatataaatcataacaccaacacataaattaaatacttgcaacaaactacctcttattgaacctgtagacatatatccacttaaaaatataggtgaggtccattctacagctgaaactgtacatggtacaatacctgtagacatagccacataacttgtaatggttaagattataggagtaattacaaaaggtacaaacataatatagttaaaaacaattggtatcccgaaaactagcatctcattgatattaaaaagagctggtattgaagcaattttagctagctttcttacatttatacgtttttcactaagaaaaattgcaattactaaacatagtaaagagccacatcctcccaataaaaccattgtatcaaaaaaggtcttagtaaaaatttctgttggtaattgattattattaactaaatttatgttaattgccatactattttcaaataaattttttgcgacggtatctaatacattactaccatgaatcccaaaaaaccacataaagtgcattaaaaaaataaacaacagagcactcataaggtttgttcccattttattaaaaacatttgaaaataaattataaaatatatcttgaaagtttgaactgccaattagacttatcattatcactctaaaaatagaaaacaaaaatactactattatgaaaggaactatagccgaaactaccatattaaagtctgcatcagccccttctgtatgaaactttacacttgtaacaaaagattctgtaagttttacaaacaatacagaagatgtcatagaaacaattatagatgtaaataaccactttgtcttaaatatttctatataagaattaagctcattaccatgtgaaaatactaaaaaagagcacattgcaactataggaacaagtactgtatacttgctcccatatatttttccataactatagcttattgttaataatattattaatgaaataattcctaaagtagaatcatttataaagttaagaatatttgtaacctctccattaaacaagcctgataaatattcttgataagcctttattggaagattcaaaattacaagagccgttgaaccagtcataatagcaggtattgctaaaatcataccctgctttatagagtataaaattttattatcctcaacattttcaaaatttctctttagcaaagttattcacctctacttcatctcataaacattagaaacatcatttcgtgatagtacatctagttttacatcttgtccaactactatatcatttgatgctaatactccttttgaagtctcatatgctaactcaggaaaattattttctttacttaaatgtgctaataatatagattctgtaccttcattaataagttcaacgcagaaattagctgcatcttcattggataaatgaccagtacttgacattactcttttctttaaagcatatgtatatgaacccatcataagcatattagggtcataatttgattccaatactactaatttagatttatatagatgtttttttatattttgagttatacatcctatatcagtagctatagacattttttcatcactctctgtataaaaattatatccaactggatcagacgcatcatgttctattgaaaaaggtctcactatgatatcacctaatgagtaggttttatcattttcaaatactttcatatttttatctttgatgtcacctaatttgtccttcatagaacaccatgtttttatattagcaaatactggtatatcgaactttctggataatatacctgctccttttatatggtcaacatgctcatgtgttataaatattccttttaatttatctgcatctacaccaatgtctttaagacctgtagttattctcttgccacttaatcctgcatctactagtatattagtatttttataccctatatagtggcaattcccactactaccactccctactgaacaatactttagcattccttcacctctttttctgccttataaattatattataccaaaaaaacagagtattaaataaaatttaatactctgcacaaaatttacttacattcactatttacttacattcacttataatcttatttatatctacacctttactattccatagttccacaaaagctcttccattagcatttttatgcttatatttattatagtattcatttaaagtctcaaagaatactttatctccaacttcttttcttatttcattaaatgctattgcgccttttgtataaacattcaagctgtattcagtagaatttttatactcatttgctggcttaaatatattttcactcaaataactttttgtctgtatctccatagtttttataagcttgtttgccatatctttaccatacttttgttcaaaataaactattgtagaatattcagtaagtgcttcatctaaccagggttcacttatttcatcatttccaacagcagaataccaccattgatgtgctgtctcatgggcaataacatattctagtaaaaattcatttttttcattatataaactttggtctatcataacaagcatagggtattccatcccccctataaaaaagtcacttgctacaacagaaaattctttgtaaggatactttccaaataattcactaaatatatttattgaatcttttgccacttcagttgcttttttagaaagctttttatttaaattatatgtattgatagctactccctttgaatctactttgtttacatcaaatttactacttagtataaatgcaaaatctctaacgttttcagcttctatttcatatagcattttcttattatcatgtttatcatcaataagttttcctgtatgagcaattttatatttatttggaatcaatagtttcacatgaaaatcgctagtctcactataaaatgggtcgccaatagtttcataactctttaaattccatcccctttcatcatttacacaagctataggaaaccaattagtaacatttatagtattttctccatatccaaatcttccaattgaatttggtatttttacgttatattttatatctaatgacattctttcatttggttttaactctttccctaattctatttctaatatgtcatttttgtctcctttaattttatactccattttactattattatttaatatattctttatatctatatatccttcgttaaatccattaggataagcccttgtcatttcacttttttcaaaaggagcaaaatctttcttggaaaaagcattcggatatatatggaaatatattttatctatgtttgattttgtattatttatgtagtcaacattctgattgcacattaacctcttagtctcatcatcaaatataacatccatattatactgatttatttttgaattagttttttctttgtatgtttctaaactgtcatccttttctataaagcaacctattattaataccataaatagaatcgctactgataatgttcttcttactttttggttgaattttataaccaaaatatctcctccttttcaaaatgaatacttttagaaaatatttacatgctaatcttgtgaccttttatttgtttacagacaaatataatataaaaaatgatataatttaatctgaggtgataaaatgttttttaaagaaagcaatgaaatagatttaggtgaaatcactattcccaatatctttatagatatatttatgccaatggcggacgggttatacgtaaaagtttatcttttaggatatagacaagcatgtgatattacttctaatcctaagttcgacaataattcaatagccaaaaacctaaatataccattgtctgatgtgttatctgcttggaaattctgggaagaaaagaagattataaaaatacatgacaatggagaatatgataattttaattattcaatagaatttttagatttaaaaaatttctatattgagaatatattaagcaataattcatctataaaatctaatacagataaggttgtatctacttctgaaaatccaagtattagaaaaatgtttaattctataaataaaatagttgggcgatatctcgacccaagtgaaaagatgagtattatggatataatgaataaatacaatatgagccccgatatgatactttgcgcatatgaatacgtcaaagataaaactggtacatcaaagccagttaaatacattgaaggcattattagaaattggtatgattcaaatttatatacgccaaaagatgttgaagaaagctttttggtaagaagtgaacgatatattttatataaaacgattttcaatgaattgggattttcaagacaaccatcaaaatcagaaaaagaacttatggacacctggtttgataaatttaatatggatatagatttgataataaatgcatgttctaagtctaagaatatttcaaacccaagtatatcttatataaatggtataattaaaaattggaatgaaaaaaatataaaaaatttaaatgatttaaagcaaaaagaggaagaacgtatagttaaggagaatattaataagaagcagattaatactactcaaaacaacaatacttacaaaaaaactaagtttcataatttcaacgaaacattcactcagtatacctctgatgagctcgatgagattattaaaaaaagtcaaaaagaaaagtttaagtaggtgattaaatgaatgaggataaaataagaaaaatacttgctaaatatgctaagagaagagatgataatgaactcttattagaacatagaaaaaatgaggtatataatagaatccctgagataaaatctatagatgatgaaatttctaaaataggtctcagtttagctaagatagtacttttaaatcccaaatctaaagatgaaattgtaaagaagactaaagagaatatagagtctttaaaagtaaagaaagaaaaacttttatctgaaagtaacatacctcttgattacttggaaataaagtttcaatgtatttcttgtaaagataaaggatttttacctaatggagaaaaatgttcttgcctcaaacaagaaattgtaaatgaagcttataaaatgtctaatttagataggattttaagtcaggaaaatttttcgaattttaacttgaatatattttctcctaagaaaggctctgatggggaaatatctcctagagaaaatatgctaaataatttaagtatctgcgaaaattttgttcatgattttaagaaggataatagtgaaaatctactgttttatggttctactggactaggaaagacctatatgtgcaattgtattgcaaaggaattgttagataaaggaaatgttgtaatctatcaaacttcttttagaattttagatattcttgaagattataaatttagaagagacacaaataaccaaataagtgaagataattataaaaacttgtttgattgtgatttattaataatagatgaccttggaactgaacttaataattcttttactagtggggaaatcttcaatattgtaaatacaagacttgttgctggtaaaaaaatcattatttcaaccaacttaacaccatctcaaataggaaatacttacactcaaagaactctctctagaatcttagataagtttaggattttagaatttactggagatgatttgagatgggaaagatttaaataaaatagcccttaaaaaacatttttttatttttaaatagagaggtaagagcaaacttgcttctctgtttaaaacttatgccacataaattaaaacatattttttatttttctatttacatatctaatgtatcttaatctaacaaatcatttacattcttagtagtctatatttattgatactataaattaaatttgctatattacataatactatgctagaatgattctaaattttatatttaaaactatcacattgcaagtaattcaaaattttgttgtatgtttaatttcatttttaatacaataaaaatgaaattaaaaaaagatacttaaaagtatcctgtaacatagaaaattatattaatttgaatttatgtactttgtggagctggtgataggaatcgaacctacaacctgctgattacaagtcagctgctctaccgttgagccacaccagcatataatctagtatttatctctaattcaaaatttggtgggactaacagggctcgaacctgtgaccccctgcttgtaaggcaggtgctctcccagctgagctatagtcccatactggtgactcgtaggggaattgaacccctgttaccgccgtgaaagggcggtgtcttaacctcttgaccaacgagccatattttggtgatctatccgcgactcgaacgcgggacaccctgattaaaagtcaggtgctctaccgactgagctaatagaccacattttttcgacttttttcgtcgtttctttcactcacaagttatattatagcgtctatacaatttttagtcaatagttttttttactttttttagaatataattaaaatcatctttagccatttattttcaacaaaattctttttaaaaaacctatatgtatctacataaattcaactttaatttcagctagaatatgtataagtagctttaacttaataaaaaatcaatgtaagtcaaatataaaagagcatctctaataactataaacattatcttgagatactcttcttcaactattttaaattatttaattgataaaatattaagcaaatatatttcttcttattatagtttgagctctatttggaccaacagaaaccatatctacacttactccaactagttcttctatttttgctacatatttctttgcattttctggaaggtcatcaaagttatctatttgagttatatcttcattccatccatctaattcttcatatacaggttcacattttgctaaatcatctaatgaagctgggaaatccgttattatcttatcgcccattttataagacgtacaaacttttatcttatcaaatccagttaatacatcaagtaacataaatgaaatactagtcaatccattaactctagctgcatacttaactataactgcatcaaaccacccacatcttcttggtctaccagtagttaccccaaattcatgtccttgttctcttatcttatctccagtttcatttatttgctctgtaacaaacggtccttctccaactcttgtagtatatgcttttactataccaacaacgtcttttatcatatttggtcctatacctgcaccaattgcaaatccaccagatgttggatgagaagatgtaacaaatggataagttcctaaatctaaatctaataaagtcccttgtgctccttcaaacaatacttttttacctgctcttactgcatcatatacaataacagacgtatctgccacatattttcttatttgttctgcatatcctagatattcgttatatatagtttcaaaatcaaataattcttcttttccatatatatttttaactattttatttttagcatctatttgagcttttaattttatagcaaatttatctttatccattaagtcacatattctaataccagatctctctgttttatccatataacaaggtccaatacctttttttgttgtacctatctttaaatcgcctctggcttcttctgacaatgcatctagttctttatgatatgggaatatgacatgtgctctatcacttatttttatattttctgtacttatattatccgttttaaacatttccaattcttctaaaaatcctttagggtcaaacactattccatttccgattatattcactgtatttggatttaaaactccagatggaattagatgtaatgcgtattttttaccttctacaactaatgtatgtcctgcattatttccaccttgccctcttactactacatctgcttgagtagcaagataatctataactttacctttaccttcatctccccattgagaaccaacaattgcaactgttttcatgtaattcacctctatattttatatactctcgaacactttacttacttattctatcaaacattcgtatttttttcaacttttttagtattctccaatatttaacatatattcttctatttttgaaaactcttctttctctattatttctttttcatattttataactttttccataaatttatccacatctaaaagtttttctaatttacatatgttaattatgtttccaaagtttgtattagtcatgtttatatgatactgattatccacattattagcataaacaacaatagactctcttaaattattgtcaattactctaaataagtttatttcatcaagtactttaattatattgggatatatatattttaagcttattttttccatattattcctcctaataattaatatttatacacagataaagcaagccaaaagcttgctttatctacttattcacacttatcaacaggctatctgtggatagtgtggatagttttttagctaaatttcaatgtttggacatatttagtgacatgtatccacatttttcctgtagaaagaaaggacgttctgtggatattcgttagattataggtctctcaacttatccccaaatctttgaacttcaccaagccaaacaagttccacagaaccagtttcaccgtgtctattttttgctattattacttctcctatatttttactctcagaatcagcatgataatattcgtccctgtataagaacataactatatctgcatcctgttctattgctccagactctcttaaatcagataacataggtctatggtctgctctttgttctggtgcacgtgataactgagatagtgcaactacaggacagtttaattcttttgctaatatttttagtgaccttgatatcttagatatctcttgttgtctgctttcattattaccttcaccttccataagttgaagataatcaataagcactaaatctagtcctttttctatttttaactttctacactttgaccttagttctgatatttttataccaggagtatcatctatgtgtattttggcatctgataatactgccatagcatctataattctaggccaatcattatcattaagtgttccagtctttattttttttaattctacactagattgtgaagataacatacgttgtactaattgttccttagacatctctaagctaaatacagctacagaggcatcaccttttaaggctgcattttgaaccaagtttaaagaaaaggcagttttacccattgctggtctagctgcaattaatattaaatcagtcctttgaagaccatttatttttttgtttaaatctttaaaaccagtagttataccagtgacatcactcttgttagtatataatttttctatcatatcataggcatccatcaaaactaagtttatagatttaaaatcatcactagttttctcctgtgatatatcaaatatactcttttcagcttgttctaaaacatcttcaatcttagttgctccactatatcctagatttattatttcattagaagcttttataagctttctaagtacagacttttcttttactatatcagcatagtattttacatttgaagtcgtcggtactatagtagaaagacttgtaatataactgattcctccaatatcattaagatgcccttgttttcttagttcttctgttaatgttatcaagtctataggctcacctttattacttaaagttatcatacattcatatattattttgtgagcctctttatagaaatcatcaggctttatagtttctgtaaccgttattatagcatctttatctagaagtatagaacccaatattgattgttctgattctacactatgaggaggaattctcgtcatatcttccatcttaatcacctctagttattactgtttttcttttacatccactcttattttagtagttactttttgatgtatttttatttctacgaaagttgaacctaaagatcttattggttcatctaataatatttttcttttatctacgtctatgtctttttgtttctttaattgctcagcaatttctttagaagttattgaaccaaataatcttccaccttctcctgcttttgaatatatttctatattaatttcttccatttgcttacctaataaaactgcttcttcatactctttttgtgcttttatttctttagatttattcttttcatttaattcttttattgctacactatctgcttgcacagccatctttttaggaaataagaaatttcttgcatatccatcacttacttctttcatttctccctttttaccagttccttttacgtcttttaataatataactttcatctattcttcctcctccaaatactcctctattattttatttaccatcttataagcttcttttagagaaacattttttaactgtgctccagctatatctatgtgtcccccgcctcctaatttttccataagtacatgtacatttatttgccctaaagacctcgcacttataaatatagtatcatctttttcacctaatacaaaggaagcttctacttctttgatatttaataactcatcagcagtttgagctattataacatttatactatctatctcagtacttgaatatgctaaacatattctattattaattattttagtactttgaattatttcagcttttattatgaaatcttttacatcagaattgaagaatttctttacctctatagtatctgctccaacttttctaaggtaagaagcagcttcaaaagtcctaacacctgttttgaatgcaaagtttttagtatctagacttatacctgctaaaagcccttcagctgtaagtttatttattgttacatcttcatccatatactgaactaactctgtaaccatttcacacgttgaggatacatatatctcatggaataaaagcactgcatcatttataaactccacacctcttctatgatggtctataactactaccttctctgatagctttaacagttcttcacattcagtataatttggtctatgagtatcaactactacaactaatgtatttttagtacagttgtcaatagcttcctcttttccaataaacagctttttatagtaattattttcatttattttatttataaatatttctatagattcatttacagattgtaaaactatgtttgcagttttgttacaggatttacatatatcataaacaccaactgctgctcccatagcatccatatcaggatatttatgccccattatataaacttggtcactttgttgtataacctctcttaaagcatgacctattaatctggattttactttggttttcttttctacagctttagattttcctccataaaacacaaatttatcttttgtttttacaacagcctgatcaccacctctaccaagtgctaaatcgagagcacccgtagcaagttttaggttctcatttaatgtatctccatctataccaattcctatacttatagtaacaggaagattatttccataatcaatatgtcttattgtatctaaaatagaaaacttctcagcttccaatttttttagctcttttttatgcattaccaagaagaatttgtcttttgaagttcttctcaatgcaccatttgaatttaattctaaagcagaaagtattttctctacttcaacattaattaaagctctcttatcttctgctgcactttttaatacttcatcatatccatctacttgtattagcatcattgcatttttttcatcatcataattttgttttacttttaaatattcagtcttgtctatccagtataatatcatcaaatatttaggatttttttcttgatcattttttataacattataaattattgtatattctttttctttatagtttatttctgtgtacatctctttattttcatttaatacttttcttaaattaagatttttaactatatcctctatatttttatcaagtaaatctttttgaccaatcatatcataaaactttccattataccaggatatatttccatcaaattctaaaatacataatggtattggaagatttattatggcttttttagttgtttcatctatatctaaagataaattttgaatatactctgtccattcatgacgtctaatattagtagttctccaattgtgaaaaaccatatatacaaaaatacagaaaaataaacaccctacatacaagttgtaataaagcaaaattatactagaaataccaataacaattatatataaatttatttctggcatatttaatttaaaggtttgtttgttactcatttctatcctcctaagtggatttatagcttcttacctttctaaagtcaattatactatctaccataccaacaaaagatattcccataaatccaaataaacataaaattatccctgaaaaaaacataattttatttggtccctgtcttatccatttctttaagaaataaatgcaaactgctataccttgaattacaaacattaaattaaaaactagctgtaaattagtcattattaattctgtatataattttgaaccaataatttgaataaataagactaataaataaagtaagaaagttgtgagtatagcatttcctggtaaataaaaatcagcaaatttaggaaatcttatattcatctttgtaatcctttttataaaaaatacactcaaataatatgtgacaaacgctgataacaacccttgtaaaaataacatcattggtagcatatttgtaaaataacttacaatctcatctggcttcattttatcaaacactttaagttcagttgcagaaaaactatttttttgaatatttacaatttctgatatcatcttagaaacttcatctaatagattcacatttaaaaatgtctttaatacaaaaaaatatacaagcattgaaagtacaaatattatggttccaccatatatcggttcgaatttattactgtcctcttgttcaaagcttctctttagcatctttcctattactatacctggtaaagaatacattatacatatatttaatgcataagaaatgtctgcaaatagaatcagtacacaaaatgtaaccaaaatagatataagagaatactttctatcagtaatagcacctataattacatatggaacagctgctaacatactaaatattcctagcattggaatataggctattactaaagcgattattatagctaaaactattatagacattgccttagatagtctaattttattattcaatttaatatcactccctattatccatatgtttttttaaattagataaatctccataccatctttcaacgctatggtcctcatctataccaatttttattttttccttgactttataatccacatctctaaaactaattcctaatctctttgctaagagatatgttatcattattatatttgctaaagtatcttgaattgcttcatctaatggttttacccctttaaacaataaattaaacaaatcacttacactcattaatatttctgttttcatccattctattatctttatgtttctcgttatctcagaacctttatctattttcacgtttacaaccctccttaatatataatattatatcataaataataatatatttaagtatataaacaaaaaaacgagctttatagctcgcctcatttagatatataaatacatataataaaaaatgagcacaaggctcatttttttagtctaatgtatatggtaaaagtgctatatttctcgctctttttatagcaactgttaattctctttgatgcttagcacaagttccagatattcttcttggtaatatctttcctctttcagttatatacttttgtaatctttgagtacttttgtaatctattttagcgtttttgtcagcacaaaattgacaaactctttttttcttacgtcttttcttattcatcatgacttttttccctcctttttaaaatggtatatcgtcatcatctatagcttgaaaaccttgtgggtctaaaccttgaggttcaaagcttggctcaaaagctggagcactctctctatatgaattttccgatttatttttactatccaaagcttgtactgatctagtacttacttttgtaaaagttctcttttcacctgattgtgtctgataattgtctactcttatagatccttgaagtgctactaatctacctttagttatgtagttagcacaaaattcagcagatttccccattacttcaacaggtataaaatcagtttctttagatccatctttttttacatagtctctatcaatggctattgtaaaggatgccactggtgttcctgtacctgggatgtatcttaattcagggtctctagtcaaccttcccactaatacaacttgattcataaaaacaccacctattttttataataaaaccagttattaagcaacaactatcatgtgtcttattacgttttcatttatctttaagtttctgtctatctctttaggaacgtctactgctgatttgaagttaactaatacatagaaaccttctgtaaacttagctattggataagctaattttttagttccccaagtatcaactttaactatttctccgtcagttgcaacaacttccttaactttgtttagtatagcctctcttacttcttcatcagaatttggctttaccacataaactaattcataatttctcactataattcacctccctttggacttaacggctctacactcttagagcagagaaatgagactaaaatctcatacctacacattttatcatttattcttatttctgtcaatttaaattttggacaaagtttagtataaggtgaattatatacttttcaaacaaacaagggatggcaacaaccatcccttgtattatatataagttattatttttaattaagcttctacacccatagcttcttttaatacagctgctatattttttataccttctattattttttcttctggcatatttgaatagttaagtctgaaagtattttctctaccaccattagggaagaatcctcctccagcaacataagcaacattcttctctaaacattttggcattaattctttagcatttaaattacttggaagctctacccatgtaaataatccaccttctggatgagtaaatactaatccttctgggaactcttcttccatagtcttaagcattacatctctacgtttaacataaactgcttttattttgtcaacatgtgcatctaggtcatacatatccataaatttgcttacttccatttgagatatagttgatgcttgtaagtctgcaccttgttttgcaaagttaaatttagataaaatttctggagaagcacaagtccatcctaatctgtatcctgggcagaatattttagagaaagttcctaagaatattactaatccttttgtatccattgattttaaagatggtaaagtctctccttcaaatcttaaatctccatatggattatcttctattactggtatttcaaatttatttactatttccatgaattttttacgtctttcaagtggccaagttcttcctgttggattttggaagtcaggtattacgtaaatcatttttattctatcagttgtttctagtatcttttctaattcttccattatcattccatcagaatctgttggaacatctatgaatttaggttgataagatttaaatgcgtttatagctcctatgtaagatggactttcacataaaattacatcaccctcatcaataaatacttttcctgcaaaatctagaccttgttgagaaccacttgtaactaatatatcatctttgtttacattagttttgtttttatcattcattctagctgctattttttctcttaatggttcatatccttctgttgtagtatattgcatagctgatcttccattttcttcaagcactgcaactgatacttttttcatttcctcaactggaaataactctggagccggcattccaccagcaaaagatattatttgtggttgttgagtaagttttaaaagctcacgtatttctgatccttgtaatccttgcattctttttgcatatttaactgccataattaaagcacccccatgaaaatgttttcttcaattcttattataccaaaattttggatattaatatacggtatttgacattttttaagtgttaaatttttatcacttttttattagcttttttactctcttttctaaggtctctctatcaagcattattagccttgaacatttagtacattttatctttatatccattcccgttcttatgatttcaaactctttacacccacatgcatgttgcttttttaattcaacaatatcacctatttttaaatccattggcataaataattagcctcctaatctaacttctctacttcttttgaaccattttctaatttacttatacaataaattccttttatatctacattattttcaaccaaaatagtttttatcttttccatatcttcaaaagaaaatttaattgatattccacaacttgctgttatttctcttggtgttggaagagccattacttttagactattttcaccaaataacttttctgatcttatcgcatgatgtgtcgaattaaatgacactatatacatttgattcattacttaatcctttctgactatctatttgagttaatctttattattagttttatattattaaacaaacatacattatatagaaatggtatttgatgcattctttaatgtctcaactatagtatacatatttgtaactgtacctacttgtaatttgtcttttaaattataataatctaaacaagtaccacaagataaaacttctacacccatattctcaagtatttttagattttctatggtttcttcattttcagcacttaattttactcctccattaactaaaagtacatacttaggataaggtttagattctgttaatgtatatataaatccttttattaacacttttcctaattcgtcatttccaagtcccatcttatctgaagatataaatatacatgtattgtctaattcactttctttattatctacaacattttgtttatctagtatatttttaccttttctaatttctatagatataaaattctctttttcgtcaacaatatttgcttcacaacttaaagatttagcaagttttaatatattctccttagctgtttcattatcaactattgtaactacaacaccttcttctaggttatccaattctctttttgtatttataactggtttaggacaagcaagccctctcgcatctatttttatactcattgtctgattcatctccttaaaaatattcatacaatttatattttatcatagatattatcttgcttgttatagattgtttctatacccttataggtttatttaccctacattatttctaaatttttgtacataaatacacctttttgataatattctaactctttttcttttgatatatttgaatataattgacctaagtctatatataaattggccaatattctattgttgcctaaatctgatactatttttatgcatttaatcagatattcaattgcaagagttacttcattctgatttttatacatattagcatagaatctcaatgctttatattcattgaatttatttttattttttattgatgaagctaaggctatcttacaatattttctagctaaatcataatcttctttatctatatatgcttctattatcttaaataatcctgacatcatgtattcatcttcatcatttttctttatgtcatataccttttgtgaatattcaagtactctatctgtttcacctatttttctgtaaacatcacaaattgttaaatacacatttgctaatccagttttattatcctcactctcaagtatttttagtgcttttttaaagtaatctcttgattcttcatattttccaatctcaagcatattatttgcttttaacaccaaaatatcgacatcttcttttctatcatttctattatctatttcatttatcttttctatgtacttcaatgacatatttggattatctagttttatgtaacaatatgccatcttactatatagttccttgtgtatgttaacatcctcaaatttattctctgacaaaatttcctctgcaaaattaaagtggcttatagcacctttataaaagtcttcctgcatatatattttccctatgtttaaataacacttaagtatattttcactatcactattttttataaagaagtacaatgccttttcaaagttttctatagcatcattataattagattttttcaaattaatattagccattaaaaaattacatctgccatagttctccattaaatcgtatctcttacatatatctaaaacttcttttatttgatcctcagccttgtttaattcattttcttttatataaatttcgctctgtagtattaaattatcagttatcttttttgattgcatttccttggtctctaataagtattctacacttacatctagcttatcgcctagatattccaacagttcataactagtatgagatttatccctctctatatggcttatttgtgctgctgttatcctatctccagctaattcttttaatgtcatgtttttttcttttcttaattttttaatcttttctcctaagctcaaaatttccatactattcccaccttttgaagacatttttttataatataattataacttatatttattttaaaaacactacttttattttacaatattttcactgtacattaaatgatttcccataaaaatgactaaaatttagtttattttgagttttattaatttaaataaatcattttttaaatttgttactattttgtattcatatatttgctcataacgactataattatatataagaatagtttttaagagaggagaaatttttatgaaaaataagaaaataatgttagtgttaagtatattatctatatctatattcgcagttggttgtactaatgctcaaaatggaagtgatacatctaaaaaagaaactaagagcaatacaaatgttgaacaaccaaaagaagaaaacaatactgaaaaagaggttcctaataacaaagctaaacctactccaaaagaagaaactaaaactcaatcagctactatttactcttttgatgtagataagacagatttaattgaaaataaagttgatttaaataaaattgatgagaacactttatttgaagaacttcaaaaacttaaagttgttccagaatctgcaaaattaaattcatttactacaaaagacattgatggtgtaaaaactggtatattagatgttagctctgactttacaaagtcaaacttaggtagtgatgcagaaactttaatgcttgattcagttgctcgtacttacataaaaaatatgaatgttgaacaaataaaaattactgttgatggttctaattacgaaagtggtcatatagttcttgaagaaggagattacttaaagtaatttcttgaaacaattatcaaatagattagaggttcttaggagccccttttcttttttgtacaaaaaaggagatgattcaaatttttattttgaaatatcccctttttttatttctatattattaaatctcatgctatttattttttgaaatttttttcaaagcttccactgctttatctatctcatcttttgtgttgaaatatcctatactgaaccttactgcaccttgttttaaagtacctaaagtggtatgtgctagtggtgaacaatgtattcctgatctagttgctatattataatcactatctaataagaaagtaacctctccagaatccatatctcctatatttagagcgattactgatgctctttttttactatcctttggtccatatatctttatatctgatacttcctctagtttgtctatcatatattgacataattcttcttcatgttgtcttatattgttgattcctctttcaaatataaatagtataccttggttaagacctgctatacctggagtattatgagttcctgattcatacttatctgggaataactctggttgaactatttcttctgatttactacctgttccaccttcttttaatatatttaagttcaacccttctcttacatataatatacctgttccttgaggcccaaataagcatttatgacctggcattgccaacatatctatattacattcatttacgtctatatcataaacacctgctgtttgtgatgcatctactaaaaatagtatattatgttttttagctatttctccaactttttttatatctattaaagttccacatacattagatgcgtgtgttgttacaatcagtttagtattactctttattgatttttctaaatcttcataatctaaaaatccctcataatcgcattttactacagtattttcaataccccttttttccaatgcttttataggtcttattactgaattatgctccatagacgttgttattacatggtctccttcttgtaatacaccttttatcgctaaatttaaagaatctgttgcattagatgtaaatactatattcataggattacttacattgaacaacttagctatattctctcttgtatcatatatctccctagcagctctcatagcaagtttatggcctgctctacctggatttgcacaataatttttcatacaatctaaaacagcattatacactctttctggttttggatatgtagttgcagcattatctaaataaatcataacaatcttcctctctgttttatatttttgttctattcaagaagcattgatacaatactatttaaatcatcatcattatagtattctatctctattttacctttcttctttcctttagaaatattcacctttgttccaaatatatttctaagtttatcttcaacatctaaaataaatacatccttaggtttagattttttaggttcttcttgtttattttcagatatttttttagctatattttcgacttctcttacagaaagttcttcttcttctatctttttcgctatttgaagttgcaaatctttatctgcaattctcaataaagccttaccatggcctgctgtaattctaccactgtctatcatttctataacatcttgtccaagatttaaaagtcttagtgtattagttatatgaggtctactcttcccaacagcttctgatatttcttcctgagttacattgtaatgctctattaaactcttatatgctagagcctcttctattgaatttaaatcttccctctgtaagttttcaattaaggctatctccattatatctttcatatctatatctttaattatagcaggtatttgatttttatttgcaagttttgatgctctaaatcttctttctccagctattatcatatatttattattttcatccattttaaccactattggctgtaaaacaccataattttttatagagtccgacaatacttttatcttttcttcatcaaattgctttctaggttgaacttcgtttggatatattttgtctatatctatgttgactatttctttttctgaagtttctcctttaatttctggtatcaatgcactaagacctctacctaatctattacttcttttagacttattctccatactaccattcctcctcttctaaatctataaattcttctgctagctccaaataagctacagaccctctacatcttttatcataataaattacaggttttccatgacttggagcttctgcaagtcttacatttcttggaattaaagttgtatatacactacctttaaagtatttcttaacttcttcaactacttgtattgataaattagctcttccatcaaacatacttaaaacaacaccttgaatttctatatcagcatttaatcttgattttactaattttatagtctccattaattgactaacaccttctaaagcataatattcacattgtattggaattaaaacactatctacagcagttaaacaatttattgtaagcatccccagtgagggtggacaatctaaaaatatataatcatattcatctattaccgcttttatggaattttttaaaatatactctctattagttttagatgtaagctctatctctgcacctgatagttcagtagctgatggaactacatctacattctcaaattcagtacttattattgcttctttaatatgtaacccatctaacataatttcatagattgtattttctacttcgtttttattaataccatatccactagttgtatttccttgtgggtctaaatctaatactaatattttctttcccaaagttcctaagctagcacttaaatttacatttgttgtagttttcccgactccacccttttgattgaatacagctataactttgcccatgatgttcccccctttaagaattaaattaattttaaatgttgaataggtgttttttaagtataaataatgtctataaatcaatttatattacaaggcttatattacaaaaaaagattactggtaagcagtaatctctattttttagggattttcacaacaacttccatataatctcccttatctatttcattatacttagcatcaattcctgtatttgatatagcatcaaaggcctgctttatagtatttatgtaaattcttatactcatagcaccctttatattctgttttttatcaggctcttcttgaactttagtttcttctaatacatcttgtatcaatttttctgtttttttaacagtcaattcattttttatgactttgtctaacacactttgcattaaatcttcacttggtagtttaagaaatgctctagcatgtctttctgttaaattattctctattagcttcatttttatatcgtttggaagctttaatattctaagcttatttgctacagtagattgatttttgcccaatttttctgctaattgctgttgagtaaaagcatgttcttttattaagttttcataaccaattgcttcttcaatgaaatttaagtcttctcgttgcaaattttctaataacgctagaacagcagaagattcatcattcatattatttataattgctggtatggttttaagctctgctaatttagctgctcttaatcttctttctcctgcaattagttcatatttgccatcttttgctctaactgttataggttgaattataccatatacctttatagaattgctcaattcctccaatgaaacttgtgaaaatatttttcttggttgatatggatttggaactacatcttctataggtatctccataactcttttatcttccataacatacctctcttattttagatataaattatttttgttctctatatgtacatacaaatttatttctgcatctactttaataattcctttatttttgtttttttacggtaagcttaattatttcctaagaaataattaagcttaccaataataattttttcattacttttttcattacttaataggatttttagctggtctaccagcttttctagggtacttaactggtgtttccatcacctttttaaaaactaatatattatgatttaaatctacctctggtaactctacatctattttttcaatatactccaatcctaaaacatcaatagccttttgtgattcttctagctctaaattagcattcggaccttttaagcaaataaaataccctccaacttttacaaatggtacacaaaattccataagaatcggtaatccagcaacagctcttgccgtagcaacatcatatttttctctatagtcttcatttttaccaaaatcttcagctcttccatgtataaatgtaatattatctaactctagtactctactaacttcctctaaaaagtttattcttttatttaacgaatctaacaaagtaagttctaagctatctaaacatattttcaatggtattccaggaaaaccagcacctgtaccaacatctattatagacatcccattttttatatatccattctttacagctgaaatagagtctaaaaaatgttttatatacacttctttttcatcttctattccagtaagattcatctttttattccattcaactaatatctctctatagattttaaatttttctaacatactgtcattcgtatctatattaaaaccttcaatcccgtttttcagaagttctatattattcacctttgccacctctagttcttctgacttgttctaggtatataagtaaaactgatatatcagctggagaaacacccgatatacgagatgcttgccctattgaaataggttttatatcatctaatttctgtctagcctctaatctaagaccttctatagatgaataatttattttctcatccagctttttattctcaagttttttaaattggtctatttgtttcaattgtttctctatataaccttcatatttagttattattacacactgttctttaacttctcttgaaacatcttctccagcgcccttccctaattcttcaagcaattcgtaagtaacctctggtctctttaaaaattcatatagagatattccaacctttattggtgttgctcctttttcttctaacaaactatttacttcttttggtgtaactctttcattttttaatctttcaaattctttatctacagcagcctttttatttaggaacctttcatatctatcttttttaactaatcctatatcataacctttttgagttaatctcatatctgcattatcttgtcttaaatatagtcgatattctgctcttgatgtcatcattctgtaaggctcgttagttcctttagtaacaaggtcatctaataagacacctatataagcttctgaacggtctaatacaaacggctcttttccttctatctttctaactgcatttataccagccataagcccttgagctgctgcttcctcatatccagaagttccattaaattgccctgcactaaataagttctcgacaccctttatttccaaacttatttttagttgagttgggtcaacacaatcatattcaatagcatatgcaggtctcattatcttacaattttcaagtccctttatagttttgtacatatctaattgaacttcaaaaggtaaactagttgaaattccttgtatatacatttctttagtatttaacccttctggttctataaataattgatgtgaggttttatcactaaatcttactactttatcttctatagaaggacagtatcttggaccagtactttctattactccactatacatagcagacctttttaaattatccagtataactttttgagtttcttctgtagttcttgttaaataacaaggttcttgttttttttctatattttcattcataaatgagaatggagttactttttcatcgccctcttgtaaagacattacagagaagtctatactatctctatgaactcttgctggagttcccgtcttaaatcttctcattctaagaccaagctcaactaagctatctgtaagatattttgcataccccaatgcattaggaccttcataaaatgcaacttcacccatatatatctttgagttcagataaactccagtggccaatattacagctttagatttaaatgaacatcctagtttagttccaactcctattacaacatttccttcatgaagtatttctacaacttcatccatagctatatcaagatttggttcatcttctaatgtctttttcatttcttcatgatatttaaatttatctgcttgtgctcttaaagagtgtaccgctggacctttggcagtatttaacattctactttgtatatatgtcttgtctatatttaatcccatctgaccacctaaggcatctatttctttaactaattgacctttaccagtccctccaattgatggattacaaggcattaatgctatggaatccaaagacattgttattatcaaagttttatatcccattcttgcagtagccaaagcagcttcacatccagcatgtcctgctccgactactataacatcatattttcctgcttcaaactttatcatttataattcctttcttttcaaaattaatgtttcatgagaaacacttcaaattttttaaaaatctctataataaaaacaaatttacttttgtacattacttaccaatacagaaattatggaatatattatctagtaaatcctctgttactgtatcaccattaatatatccaagatagtcccatatattttttaaatcgacttctacaaagtcaaatggcatactttgttccaaagcaattaaagcatctgttgcagatttatatgctttactaagtgcatctttatgtcttgaatttgttactactaaactagaattatttttgatactacctttatataccatagactctattttatcttgcaattcttctattccttcttgttgtaaagctgatatttttattatactattattttctacatatttaagtattttttcttcttcaatctcttgtttcaaatcattcttatttaacagcactattgtttgtttatccttaagtttttctaatatctctatatcttcctctgacaactttctagatgcatctaaaaccattactatcaaatctgcactagtaaatgattctttagacttttcaacacctattttttcaacgatatcatcagtatcccttatacctgctgtgtcaacaatttttaaaggtataccttttatgtttacaaactcttctataacatctctagtagttcctggtatatcagtaactattgctctattctctcctaaaatagaattaagtagtgaagatttacctacatttggtttcccaacaattaccgtctttaagccttctctaagtatttttccactttcagctgtatcatataattttttaatctcttttttaagttcatcagttttttctttaagagtttgatatgttatatgctcaatatcttcctcaggataatctatagcaacttctacatgagctaatatctcagtgactttatctctcaattctcttatcttctttgataaagaaccctctaattgattttgagcaacttcatgagctatatcagttttggcttttataacatcaattacagcctctgcttgagataaatctattcttccatttaagaatgctcttttagtaaactcaccagcctctgctaatctaacatcttttgatagtattaattctaatatcttctttaccgaaataaatccaccatgacaattaatttctataacatcttctcctgtataggagtttggtcctttcatatatgccaataaaacttcatcaattatattttcattatccaatatatttccatatattaatgttctcttattgtattcttcaatactctttcccgacatagatttaaagatttcttctgcaaccttcaaagctctttctccacttattctaagtatacctataccaccttctccaggtgctgtagctattgctgcaattgtatcatctataaacaaatttatcacctcttaattcataattttttacatataggtttacatttaaccaatcattaatgatttaataatattaaaaaataaaaccccctaatgtttaggaggttgactttatcttttacactcaattactaatcttctatatggatcggttccttcactatatgtaattacatatttgtcattttgaagagctgaatgtattattcttctctcatatggattcatataatctaattttttagtttttcttgttttcgctacttctctagcaactttattagcatatcttattaaagattcttctcgttttgatctataattttctatatctacaagtactcttgtatgagaatctttatttattttattaagagctaatccagtcaaaaattgaatagaatctaaagtttcccctcttctaccaattaaacttgcagcttctttgccttcaatatcaaccatgattaaattatctttttgagatacattgactttggcatcaacatttgcatttttcaacattacctctataaaatttttagctacatctacttccctctcgataacaaaaatttcataagtaccatctttagcacctataaaacctaaaaaccctttacttggattttcaagtatttctacttctatatcctctgcttttaaattcaactctgctatagctttacttatagcttcctctttactcttactttttattaattttaggctttttctcattaactttttcctccttagagttagcagccagtttagcttttaaaggattcattattaagtaatattgagctattgagaataagttacttactgtccagtacaatgtaagtcctgctgggaatataaatccccaatagaaagacatacctgccattacatatgtcattactttcatagagccttgtaactgatctttgggtgtcattactttttgcatgacatatgcacttgctcctgaaaatactgctaatacataatctggtgatgttaagctttttatccataaaaacccattgtcagctgctaaaaatgcagctttgtttgcaaaaacgccatgagcaactggttctctcaaaacgctaaataatcctattaatataggaaactgtattaataaaggtaaacaaccagatagtggattaattttagcttctccatataacttaacaatttcttcattttgtttttctggcttatttttatatttttcttgtatctcttttatacgaggttgtatatcttgcattgcctttgttgacttagtctgcttaattgttaatggtaataaaataatctttacaagtatcgtaaaaagtattatagaaataccataatgattaacaaattcaaatattaccttaagaatcaatcctaagaaatttcctattatattcaatttttttatacctcctaatagttactctcttttattttagagggtcgtaacctcctggatgaaaaggatgacattttaaaagtcttcttatcgttaaatacataccttttacaaatccatattttttaaacgcctctattgaatattgtgagcaagttggataaaatctacaggtaggtccctttaagggagatatatacttttgataaaatctcactaaataaatacataaattcgataaatacctacttatttcctttaatatataaattattttattcaaagtcattaacctccatatttatagcatacaattaaatagaaatatccgttcttttaactaaattttttatagacttgtctatgtctttaaaagtagcatccttactagatacccttgctataaatactatatcatatccaggcttaattttttcatcaatatttaatctgtaggcttcttttattaatcttcttactctattcctagtaatagcttttcctactttttttgaaacagaaatacctactctactataatctgatttatttttaagtatatatattactaaatatttgtttgcaaaagatttgccgtgtttatatacttttctaaaatcagagtcttttttcaaccctttagtcctattaaagtccatagttaacctccataaacacagctatgaattgtaattatttacacaaaaaggccacctttgcagcggcccttttgtaattaatgagttaatctatttcttcctttagctcttcttctctttaacacgtttcttccgttagacgtcttcattctttttctgaaaccatgttctttacttctttgtctcttttttggttgataagttcttttactcattattttgcaccgcctttcagattttattttccgtttataaaaataataactttaccctcaaagtaaacataacacatataattataaatacttttactactgttgtcaacgagtttttgggacgcttatatcacaaaatctaccatatatatattatgtattttttttattgaaaatactagcaaaaatctatttaattttattctaaattatttttttcaattatatacacaaataaagtaattttaacatgtttatatttttatcaacaattagttaatattgtggataaattagttacaaatcattgaagtttgacatatattttgatattataaatatacttgttgataatgtgcataaatgttatcaacttattagaaattattcacagcttgtggatacttttgtgtataacttttaagattactgacaatactctagttataatcaccatttattgtatgtttatgttatttataactttatctacatattgtttatatcttttcatatttttttaataatttatactattattaatttatcaacaccattatccataaatttagttattctgtaaaatttatatatatttttgcttttctgttaataactttgtggaaaatattaattattctgttcggaggtttatattctcttttgcgcagagtggttttttacttgtctaaataatttgctaattatatagaatattaaactagctataacaccagctaatacattaagtaaaaaattatccatacttcatcacctccctttgtagcgttgggaggataatcttttgtgtatagactccactctttttttagaatatagattgctttctcttgctaaaattattataacatatatttacataaaaaaagacttagtttatatactaagtcttttaaaatgcagtattttagaaaatatatttttaaaatataatttattttcaaaaagagtatatttttttataatttaaatgtgctataattataatcacaacgaacagaaaacttttttttaattggtttaaaaaaatctacaaaaaaataaacaaggaacatgtacttgccgtcaaacaaaccatgttccttacaccggaggttagacctctcttaaggataatatatccttgtttttctatacttatatttatattataagacaaagtgtagaaaaacacaatggttttaaggtaattttaatagtaaaattattacaaaaaatcaaaaaaagagcgtcagcctccaggtggaaattggagggataaagatgaagaatgttaataaaaataatatagataagatgtttttagaagaatgtagcgctgaaagagcagagcatgaaaaagaaaattattcaaatttcaatagacatgaaacatatgaaataaaaaaatatataaacgaaaaaaaactaggaattaaaacggctatagccaacgcgataaatggcgggaaaaccctgtttattgcaccgacaggagcaggaaaaagttatagctttataaatacattaaaaaaattaaaaacaaaagcgttattcatacttccaaatgcttcaaatgtggagcaggcaatgcacgagtatgatataccaggagcatatgacaaaatacctgttagcgaagcatttaaaaatggtaacttagttgtaatgacttgggataaaactgaaaaacttataaacacagacttaagtgaatacataattgtagttgatgaaatacatcaaacttatacagatgcatatcgaggaaaagcaataaaaaatctaaataatataatgtctaagtgcaaaggaagaatagacattacagcaacaccaacaaaacttgaatttgaaatatatgactacataatagagtacactcaaaagcaaaaaacagaatataaagttaaattgtacaacgactttgacaataaaaattttactgaaatgattaacataataaataaatctaaaaacagcgccatgttgatgaatgatatatcaacattagaatttataagagattcagtgaacaaaaaagttggagttgtatatgcagatggaaaagaagagaatgaattgtacaatagaatagttaaaaattcagacatgaaagactatgaaacgcttttaaatacaacaacaatcctagctggtgtaaatataaacaacaaagatatcacagatataattattgttaatataaaagatgttggagctataaaacagtatgttgcaaggtttagaaacttaaaaaaagtaaatgtacacatattcaataaatatgaagaagagtgcaatgtatacaaaattgaatggctagttaacaaaaatatagaaaaagcaactatcttaaaagatgcttataacaaagtatctaaacacatgttacagtttgaaacagttggaataaatgcaacgccaattcgcatagactcaaatgtgtactactgtacaaaagataattgctataaagtagataaattatatataaaaagtcaagtttacagcaactattacaatacaagaacaattcaaagttttaaagtgttattagaagaatattttgaaaatgttaatataactgatgctaaagaagttggcacaaatgaaaaagagttaaaagagtacaagaaagttgtaaaagaaattaaagatgcaacaagagaaattttaaaagaacataaagaaattctagtaggttatagacagattaaaagcgattctaagagcttttcactaatgcagtatcataatgatatgaaactaagttcaaaagggtgcttagaggcttacagagcgtatgacatacataatttggtaaagaaaagtaaaagtaatagcatgttagaactatattctaattatgtactagataataagttcgacttagaccttgcttggaaactagcgaatgcagcaaacaaaagacgtggggtaatatttaataaaataaatactttaatatatagagaattaaaagaggaatatccagagtttttaaatgatgaacttattcaagttacagtatttaattatatagataaattgtttggaattggaacatcttataaagaattgcatttacaagagttaagtaacgacttaagaacaattttaggggaaaactgggatttaacaactaaaaagctaagcgttacactgaatggaatttttattatagaaaagaaaaaatatagtaactggcatgatatagaaactatgtttttttataaaaatataaatcctatatcatgccagtttgaaaaaaaacgaatacaacttaataatataaaaagatatataactgtagatgacataaaaaaagatttagaattagacgaaaaagataagagtttagaaaatgctataaaatatacaaaagacaggatgttgaactctttagatgaagatgaaaaactattgttattaaaaggttttatgtagagacaaaaataaatttcaaaaatatttacataaggagataaaaaggatgtttgaattagatattaaagttaaaaataaatatatagtgagtgtgagttatgagttttcagagcttttaatacgagcttttaatgactatgataatttcataaaagatataaaaaataaagataaatttatacctataggcattaatcttggatacagagaattgttagaagaaaattcggcatatcatgagtataatttttattatgatgaagaagttgataagtacttttttgaacttcaatatcaagaacaggatttaagggaggagctttcaaaacaacttttactagaacttataaaaattaatttaccagctggggcagaattaattgtagttgattaaaattgtatttaatcaaaaagaaacagaatcaaaagaacaattagaaatttgcatctaaaaacaaaaagtcagtcgacctggaatatatatatatatatatattccaggtcgactgactttttgataatgagtcatcaattaaaataaacataattagcatacaatatttaaagaaatgctataaaaactagaaaacagaggttattgagtaaattagatgaaattgaaaaggcatttttaaacaatgaatttgacataggatttaaaattgaaaaagaaatagagttagtagagcaactagaaatttgcatctaagaacaaaaagtcacgcaagtaggatttaatatatatatatatatatattcctacttgcgtgactttttgatgtgaaaatataaaacttataccaaatggaaaatcgcaaggttaaaaaaattgaccctgaactttcctaatgtaagaaaattcaatgtattttgaattggaattattttccactagcaaaatttgataaaaggtactattattgtagtataaatgtttaattgcgacaaaaaatcgtacatgtgttcttgtaatatcgaacaaaagggggtataattaaaattgtaagttatttttttacaaattttaagaatgtattattctacttgcatatagggggatgatttggttgaaagaagaaataaaagaaatgttggacaaagtaggggataaggatatattagagattatttatctgtatttaaagcaaaaaactaaaaaataaatatgtacatatgaaaagactatcaaatttaagatgatagccttttattctttttgaaataattctagtagcttttccattgcctctaattctttgtcatttaacttgctaaattttaacattgctttagcaagacgttcattcttatctattgcgcataagacttctgctgttattaagttattgtttgaaaaagtatacatatcgccttcgcctgtttttagccatttttcgtttaccttaaatgttgaagttattaattttaaatcactttcttttattcgtgttcttccactttcaagattgtaaatttcgtgtctagtcattcctagcttgttcccaaattcgatttgagatagcccctctgcaattcgcaagtctctaattctagtattcattttaaaactcctttcatagcttaattttacagtaaagttgcccgtaagtcaacgcaaaaaaacgcattggggcgtagtcttgcgaaaataaattagtaaaagttattgacttgccccttattacgcactataatataaatatattcgcaataggagtcaggaggttgtttctatgactagagaagaaagaattttaagaaatgcaattttgtacttagatatgagtgaggaaaagcaaagaatagttgactgtattttaaatgcaaagacaatagaaaacattgttgagaatgatattttagatgttaataaactaaatgaagcagtaaaagaaatagaacaaattatttgttaaaagcgtactttgacggctacgctaaaccaattaaaaaaagtaaaaaataaataaggaggctggaaaatgataaaagttattttatgtagtactatcgacgagtacattgaatatgaagatgtaataggagcaaaagacagctatttaatggatgttatcataggtggcgaatgttcagaaattgatgctatagaaactttagaaattttaaaaaatagtaaagcgagaattgtatcagaagcagaaaaaacttgtttaaaatttggtattggtaatcaaatttcaaaggcgatagaacaaggtataaaagagggttcaaaactaaaaaggaggatacattgtgataattgcggggcaatcgtagacagttcggaagaattgacctcaatgccagttttagaaaattataacaacaatcaatccgtttctgaccaactaggaagtatagatgtatgcccaaattgtttgctagaaataacagacttactgtaattccctgttttagttgaaaagaaacaaaaagtaacagcgtaagccgtcaataaaaagaaggggggtttaaaaagatgattaatttagaaacattgtgtaatggagaaacaaaagaaaagattgaaaatggattcatggagatatttaaaaacatacaagaccctaatacaccagcgacatctacaaggtctttgactgtaaaggttacactaaagccaggtaaaaatcgttctcatgttaatacgcaaatacaagttattccaaaactcgcaagtgtcttaccatctgaaacggacattatagttgaaaaggattttagaactggagaagttaatgcaaatgagtatggaaaccagttgccggggcaagtaaaattaggcgacttggagagtaaagaaacaagtgtaacagaagaaacagaagtaaaagaaagtgaagaagataatgttcgtaaatttaagagtttaaaagacttataaaaactaaaaaggagtgtttaatatgttaacagatttatttaacagggtaatggaagttggagcaagaaaaatagaaacaagagaaatcaatggggttacgtatacgactgaccccttgattgaggttcatcctagaccagctgaaatagttaggctaagcactttagatggtttaataggatatataaaatcaagtattgatagtaagcttaaaagtggaaaacttatggttcaagttgaaagccctaaaagtgttatattgtgttctgaactacttgaaagtggcaagagggatatttacattgaaagtagagctttattacctcatgttaatttcgattgttcgcttgatgcagagcaatttaacgttatgttgcaatcctctttcgtagatacagaagataagaaactgcttttaaaagtaagcggaaatgtaaaagaaacaagtgtaaaaactgtgcaagatgatggagtatcacaagtagtcacaatgtctacaggtgtagcaagtgtagaggatgtaatcctgcctaacagagttaagttaaaaccttacagaacttttgcggaagtagaccagcccgaaagtgaatttatctttagagtaaaagagggcattgcatttaagttaatcgaagcagatggtggagcatggagacttgaagcaataaaaaatataaaagagtacttagagaagaaattagaaggtattaaaaatatagatataatagcataaaaaattgaagaggctggactaaataaccagcctcttttaaaaaggagtgtttattttgtataaagatataacgaaaatgggagcaattgaacgtggggaatatgttggtaatgttgctcttgaattaaaagaagaaaatcctcatcttagtaaaatagatttaattgagttagctcttaagaaaataagagaggaaaaggaacaggaggctgggcaatgaaaataggtaaatacttaatcgtttcccaggagcaggtggatagaaatattgaatgtttgaaagaagaaaacaaagtaagggacgataagataaggtattatgagcgtattatgagtaacaatgaagaattgattcaaattttagaagaacagttgaaagagtataaaagtgaattagatgtatatagcttgtttatagattgtattttaaataaagaaacaaggaaagcgatagcgatttataacagaactaaaagcattagaattaagcaaaaatgtcttaattctatacctataaaaaagggttaagttgaatgaataatttccttgtaggaataaatgaggtgcttaaatatgagtgaatttgtgcagtgttgttgctgtgaaagaacaataaatatagaagaaaataaccatgtacagtatgaaaaagaggctctaggtttagtttttacactgtatttctgcttaaattgcgtagatgaattaagcgaaatggaataatttttaaatgacgaatggaggtatataaatatgaaaatgaaaaatgttttaaaactatcggcaatgtattgcttttgtccaaaatgtggaagtgatgaacttggagaaggtgaaggaagtttaatcgttgatgagtatacatttcatagaaagtgtaaatgtggatttgacattatagtagatgaaaggaatgacgaaatataatgatttttttaggaatgataattttgattatatttgcattttttattggtcgtatatatgaatatagagttaatttaagagaatgtgagaattgtaaggggggaggttggaaatgaataacactacactaattggtagactaacaagagaccccgaattgaaatatataccaggttctggaacagctgtatctacttttacaatagcagtagatagagattatgttaaaaaagatggaactaaggaaactgatttcatacctattgaggtgatggggaagttagcagaagtatgtgctaataatttagataaaggtaggttagtagcggttgaagggtctataagggttaatctttatgaaaaagatggcgagaaaagaacttatacaaaagttcatactaataaaattaaatttttagattataaaaaaagaggataatgaaaaagaatgtaagttcgagccgggaggcttagacccgcaaggtttccaggctatagacgacgatatacctttttaagtaggtgattaaatgattaaaaaagtagaaaaaatttttagtggttcagttaatctgaattttatggaagatgacctaacttttaaaaattatttagcgttatattgttgcataaaaccggttaaagttcatggaaataaaaaggttttggctagttctactaaggcatgtagtgcattgaaaattagagagcatcagaaaaaagaacgtaaaaaggtaagacttgtaaatgcaaaaacaggtgaaataaaagaaatggctatagatgaagcagaaaattttttaaatgttaaagatttgtaccctgtaattcggagaggaagacctacaagaactggctggtatgtaaaggatgttagcaatgaagaaagatattaaatacaatgttatatattttaattcaagaactttaagaatggataaagaaagttttagcactttaatagatgctagagtttgcaaaaatgaaaagataaaagaatatgaaaatgttgaaattattaaaaagacaattatagaaaaattgatggtataggaagtgaatttatggcaaaaaagaaaaggatttgttcatggtgcggtaagtcattttttacagagtcaaaaaacggattttgctgtaaatcatgcgaaagaaagtataaaaaagacaaagaaaaaaacgtaagttcttgcttagttgaagaaaccaaagaatatttaattgaacttggaaataagaaaagaagagtagatattctaagaaaagagatagattttttaaaagataaagaattttatagagagataaatttcaatgaactagggtttaaaatacattctagcccgaagggcatagatgaaatgattatgaataatgaggataaaatatcatttaaagaaagtgaaattgattttatagaatatagattgagactaatggatatttacataagtgaacttacagaagagaagcaacaaattataaaatttatgtatttttatgatggcgcaagtaaactttctaatgaagaaattgcctcaaagattaaatgtagtcgcagtaatgttcattataaacacaaggaagcattgaaagaacttgccgaaatgctttttgaaagtggaagtcttttgtagaacgaaaaaagacggtttttaagacaaagttagaacactcttttacgtttatatagtgtatgatattaatatcaagaagtttaaatttaaatagatatagatttgaagcctggcaggaatgttgggctttttataatgcaaattaatattttaagggggttgagaaggtgaatagaagtgggtagtaagaaaccagctaacccaatcaaagacaaacgtatggtcttaaatatacaagaatacttaaaagaaaagagtgttagaaattatgttttatttgtcttaggggtggctacgggctatagagcaggggatttagttaagttacaggtaagggacgttagaaatgcaatagacgaaggttatttcttaataatggagagtaaaaaagaaaagactaagaacataagaaagaaaaataaaaaacctagaaaagctccaatagttcctaatttagaaagagtactcaaaagctacatacgagataaaaaggattatgaatatatgttcccatccaggcaaaaatctgttactccgcatataggtgttgagagagtaacagtgatactgaaagaagcaggtagatactttggacttaagcatataacagcgcatagcatgcgtaaaacatacgctcgcaccatatacgaagaaagtggatttgacattataagagttaaggaaatgcttggacattctagtatagaagaaactaaggcatatctaggtcttaatgaagaacaatatcaagaatatagcatgtttttaaatgacctaatagggtgattttttttattttgtctttttgaatgtgggaaaaataaaggcttatatattcaatacatttttttcgctatatataaagtaggaaaagtaaaaagtgaatgtctgattctctaagaaaaccccatattcgttaaaataggcgttagccattataaatactgggatagaagctatttaacgttaaaatgggtatggtgaagcttaaggacatgcggacaaaacttaaaggacatggaaaaatagagaatgagattgatgtaataaaaactataaaattcacaggcaaacaattcaattacgcccttttacaagagtaatgacaatatttataagtacttttgattcatttaaaaaaattcactcgtattcataactgtacggtattgactacgatttaattatgtagtaaaatgaacatatagaaagtagtcataactaatggtcaaaagtaaggggtgtatttttatgatatttgggtattgtcgggtaagtagtaaagtacaaattgataataatagtttagaacagcaggagcaggaaataaaaagacattatagtgatgctaaaatatttagggaacaacatacagggtcaaccacgcacagacctatttttgaggaaatggttaatcaaatgcgtgatggtgataaattagttgtaactaaattggatagacttgcaagaaatgcaacagaaggcattaatcttatacaaaatttatttgatagtggtatttctgttcatgtgcttaatgttgggcttttagaaaatactactcttggcaagttttttataacaaccttgcttgcagttgcagaaatggaaaggaatctaattttagaacgaacttttgcaggtaaggagatagcaaagcaaaatcctaatttccgggaaggtagacctaaaaaatatactaagatgcaaatggaacatgctttagagttattaaaaactaattcttatacgcaagtagagaaaatgacagggattagtaagagtacattgcaaagagcaaagcgaaaacaagaagactagatacctagtctttttttattgaaaggagttgatttgtatttcaataaaaaattccaatcgagaaaaagcgtttgagatttacaaagagaaaaatgggagaataaaattaattgatatctctaaaatgttagaagaaaaaagttgcaatattagtcgttggaaaaaaattgatagatgggattatagacttggaataaataagaaagttggcgcaccagccggcaaccaaaatgctttagggcatgaaggaggcgcaccagtgaataatcaaaatgctagaactcatggatttttctctaagcttttgcctgctagaacttacgagattgttaaatatatcgagaaggatggtggtaattctttagacattctttggaacagtatagtagttcagtatgcgaaaatattagattcttttaagattacccatgtcaagaataaaaaagaccatacaactgacattaagaaaaatggtaataaaattaaagagtatgaaattcaacactcttgggataaagttacaaatgctatgaaagcagaggcgacagcatttaaagctttgtcaaaaatgataaaagactatgaggaactacttcataaaaattgggatttagcaacagaagaacaaaaaaacagaatagaaaacataaaagcgagaacaaataagttgactggtaatgacttagaaatagaggatatagaagaaatagaggcagaaatatatggcagtaactaagaagaaaactataccttttttatttggagataagcacaaagaatatattaaaaagtgcgctatcaatacatacaatattgccgaaggtgctgtaagggcaggcaagacggtagacaatgtatttgcctttgcgcatgagataaagacatctaaagataagatacatctagcaacagggtctacaagtgcaaatgcaaaattgaatattggagatgctaatggttttggacttgaatatattttcagagggcaatgtcattggggcaaatttaaaggcaatgaatgtttatatataaaaggtatttcaactaagcataagcaaaagattgttattttcgctggaggtgctaaggctgatagttataagaaaataagaggtaactcgtatggtatgtggatagcaacagagataaatctgcaccatgataatactatcaaagaggcttttaatagaattatagcatcaactaatcgtaaaattttttgggatttaaaccccgataatcccaactcgccaatttacaaagaatatattgatagttatatgaaaaaagatagggaaggcactttactaggtgggtataactatcagcactttaccatccacgacaatataacagtctcggacgagagaaaacgggcaattatatcccaatatgacgagggtagtatctggtacaagagagatatactaggtcagcgctgtgtagctgaggggcttatatatgaatactttgctaataataaagagcagtttaagactgaaacaattgacccactcatggatgttattgttggggtggattttgggggcaacaaatcatatcatgcttttgttgcaactggaattacttataactataaaaaagtaatagctcttgcaagtgaaagacctagcgcagataccagtccagatgagttgaatgctttacttataaattttataaaaaaagtaataaatctgcatggtaaagtagattgtatttactgtgatagcgctgaacaggtactaataaaaggcattaaaaatgcagtagaaaaagaaaatttaaatgttagtgttagaaatgctttgaagaacgctattaacgataggataagacttacagacttattaattagtcaaggtaggtttgagtatacaaggtatagcgagactcttgttagcgcattatgtggtgctgtttgggatagcaaagaaactaatgaggatgtaagacttgatgatgggtcaagtgatatagatagtttagatgcttttgaatatacgatagagagatacttgaaaaagtttataagaggtgactaaatgtttgaaggattgaaaaatgctataaggggggtgattaacaagttgtttaataagagttctatacaaaatgaattaaaggtagatatagctgttagtgataagatgtcaagagcaattgacttgtggatggctatgtacaaaaacaaagccccctggctaaatgaagtgactaaaagtttaaatttatctgctacaatttcaagtgaagttgctaggcttgttacccttgaacttgaaagcgaagtagtcgggaatgactttttaaatgaacaatatcaagacgtattaaaagatataagaaagtattgtgagtatgcttgtggggctggcgggctggtatttaaaccatatgtaagcggaaacaaaatagaagttgattatgtccaggcaagtaatttttttcctacagaatatagttctacaggcgatattacatcagctattttttcagaaataaaagttaaaggtgatattaaatacactagattagaatatcataattggacttctacttcttatactatctctaattacgcatataagagtaatacagcaaagttgattagctattcagatgatttagggaagggaattaaattaagtgatgttccagaatgggcagagctttcagaagagttagtgttagaaggaattgaaagacctttatttgcatactttaaaatcccacaggctaatagtttagaaaactcatcacctttgggcgtttctgttttttcaagagcagttgacttaataaaagaggctgataagcaatattcgaggattttgtgggagtatgaggctacagagatagcaattgatgcagattctagtatgttcagaagaaacgcaaatggagaatatgaagttccgcatggcaagaaacgactgtacaggatgttagaaatggaggatggagacaataaatggaatgtgttttcaccagccataagggattcaagccttttcgctgggcttaatcaactactaagaaaaatagagtttaattgtggattgtcatacgggattatatcagatgcacaagagactgaaaaaacagcaacagaaataaaaactagcaaacaacgtttatactctactgttaaggatatacaaaagtctttagaggacgccctagagggattaatttattctatagataagtggtctattctggcaggatttactcctagtttgaaatatgaaacgactttcaattgggacgatagcgtaataatagacaaagattctgaactcttagcaatgcaacaggatgttgcgtcagggctgattagaccagaattatatattatgaaaaaatatggagtcacagaggatgaggctctgaaaatgatgcccgatactagggaattagtagaggataatccttttgacaagggtggtatgtagatgttaacatctaatgagttacaagaaattcctaagtattttgttagtttatttcaaactttagaggactttgtaatagcagatattgcaagacgtattgcaaaggctgggaatattacagatatggcagaatggcagttaataagagcagaagagattgggatggctgataaagtaattaaaatgaaaattgctgaaatacttgatatctcttttgaggcagttgacaagttatttgaagaaaatgctgtaaagtctattgaaagtgatagtgctttatatgaacatgctaaattaactccattgcacttgaatagttctgaagaacttaagaactatgtttcttcagctaaagagcaaactaagggtaaactgaagaatatgacaggtacattaggattttgtactattaaaaaaggtaaagttattagtaagaaacttacagacatatatatagagtctttagacttagcgcaatttcaagtcagtacaggagtcttggattataagacagcagttaaaaaagcagtcaagaggcttgcagatagtggtttaaggtttatagactatgagactggttggacaaatagaatagatgttgcaactagaagggctgtgctgactggtgttaatcagatgtcgcagaatattaataataaagtcattaatgatttggatactgatatagtagaagttacagcacattcgggggcaaggtgcgagggagcaggtattaaaaatcataagaaatggcaagggaaatggtatagtttgagtggtaaaagtactaaatatccttccttaaaagtggttacgggctgggggcaaggtgatggtctggggggctggaactgttcgcatcaattccatgcggttattcctggcatatctgttcctgcctactcaaaagagcaattaaaaaatatagaccctcccgatattggatataaagggcgaacttatacgcattaccaagctttacaatatcaaagaaaaattgaaacatctatgaggcagacaaagaggcagttaatcgcttacgagtcggcagggcttaaagatgagtttacaaatgcaagtataaagttgcaaagacagaaacaagagtatagagagtttagtaagattgctaaaatgaggttgcagaatgagagacaccaggtttttggatataataaaagcgtcagccagaaggctgttcacgctagtaaaaaggagagaaaaaatgggtaaatatagaaagaaagcaattattgttgaggcttttaaatggctaggaagtgtagaacaaaaggaagaaccgacatggatagttgaggctattaaaagtggtaatgtttggattgaacaaaatttaggggaattatctccacgcatgtatataaagacgcttgaaggtatacatgaggctaatgtgggggattacattgttcaagggataaaaggagaattgtatccatgcagggctgatatatttagagaaacatatgatgaagtcttatatcgataaggcttatttttatgcttaaaaatacttaatttatttatatagatgtctactaagcgacgtaaaaagttagacaatacgtgatgctaccacgtaaaaaagcgtagttgtaaacgaaagcaggaggtttttatgaaaagagagtttttgaaagatttaaatttagaggatgaggttatagaaaaaatcatgtccgaaaatgggagggatatagaaaagtataaaaaagaagtagaaaagaaaaaagaagagttggaaagcaaaaatactgaactcgaaacagctaataataaaattaaagacttagaaaaaatagatgttgagagtataaaaaaagaggttgatgactggaagagcaaagccgaacaggctcaaaaagataaggaattgattgaaaatcaaatgtcagagcaaacttataacttaaatttagataattatttaagtaattttaagttttctagtaatctttcaaaagaggctgtaaaaataaaaatgaaagaaaaaggacttgaatataaggatggggcgtttgagggagcagatgattatataaaagaattgcaggcaaatgacccaggggcttttataagtggcaatagtgttccaaagattgttagttctagcggtggagatgctggagagtctaaagtaagtttaatggaacaaatgatagcaaaaaatagagaaatgttgaacatataggaggtagaaaatgagtttatttgattcaaaaatttttaatggagaagtgtttggaaaatacgttgagaccgtacctaatctaaatagggacgaattaataaggtctggagcaataagaagaagggacgatttaaaggctatgttttcagcccaatcgggagcaaattatgcaactattccaatgcttggcttgattgatggcgacccagtcaattacgacggacaaacggatatagtagcaactacaacaaagaccttttcgcagtctgtaattgttgttggtagagctaaatcgtgggtggaaaaagactttagccaggacgtaaccggcggagttccttttatggagaatgtaggaaatcaagttgctaaatattgggataatatagaccaaaaaactttgttagctgttctggaaggtattttcgcaatgacaggggcgaaaaatttagaatttgttaacaatcatacttttgatataacaaaagaagcagaaacagaaaatcaaaaggttaaagccgaaactcttaatagtgcaactcaaaaagcttgtggagataataaagaaaaatttgcacttgttataatgcacagtgttatatcaactaacttagaaaatttaaatcttgttgctaggttaaaatatactgacccacaaggtattcaaagagaaatgaaattaggaacttggggtggcaaattagtcttaattgatgacaatatgccaactagagaggtcgctgaaagttcagagggttcaaatgatggatacacagagtatacgacatatgtgcttggggaaaattctattgacttcgaggatgttggtgcaaaagtcccatatgaaatggatagagctccaggtaaaaatggtggagaagattacttatatagtagacaaagaaaagtatttgcgccatatggtattagctttactaaaaaagcagttgcaacagcatctccaactgattcagaactgaaaaacggagcaaattgggagcttgtgaatgatagttcggatgggtctaaaacttatatagaccacaaagctatacctattgctagaattatttcgagagggtaggctatgaatatgtatatagactatgaattttatagcgctcttgggggagaaatcccccaggacgaatttaataaatatgcaataagagcaactaagtatatagattataatacttttaatagaatagaagaagttacagaagaaataaaaatagccacttgtgagattgctgacctcatatataaaagcaacctggaaggcaataaggaagttcagtctgaaagcattggaagtcattcagtgacttattcaactaacaataaaacgatagagcaaaaagcatatgatattttaaaaatgtatttagattcagatttgctgtatcgaggtgtttagtgtgttttttaaagataatataactttatataataaatattatgataagtcctctgataaaactttatacaagaggacttatctatttgaagtagattaccaagaggctaaaaatatagctgttacagacaaggggttgttaagtgctgatagtgttaaggttgtagtccccttttctgtaaatgcaagagggaagaaatatatagacccttttaaatattatgaactagaagaaaatgaaaagaataaattttatacttttaaagttggagatattattgtgaaagaggtcgtagactttgaaataactagcgttaagccttacacattaagagaattacaaagtaaatttgatgatgttagtattataaaatcggtcattaaatgcgattttggaagtataagaatgagacatttcgaattggaggcagaataatatgggatgaatgttcatgtagatattaatgcaactagaataatgagagcaaaagggcttggaagagggggcaaggcacaaaagtttttgactcatgaagttagaaggctttcagactcttatgtacctaaacaaagtggaacgctgaaaaatacagctagagaagaagttgacaagataatatatatacaaccttatgcaaaaccgcaatattataataatgcagggtgtggctcggagggtattggagcaggagggaaaaggggcaagcattgggaaaagagaatgtacgcagacaaaggggacgaattaattgggtctgttgctaaatttgttggaggtagaagggaatgactttagttgaaagtgttagagagtttataaaaaaatgtccctatttggatgaatttgcaaaaagtataaatgtcgagtttttaggtgaggaatttacttcttatacattagagactgttccatcagaaacagtcattaaaagatttataaatggcgactctataaaacagtttatatttatatttgcaagtagggagtgttatgggtctgatgttatgcagaatatagaaaatagccagttctacgagcaatttgcagactggatatatagagaaaatttaagtgggaatttgcctgttttgtctggtgataaagaggcaatgtcactagaggtaagcactccaggatacccagttcaaacgggtatagatacagcacaatatcaaatacaattaaaattaaaatattttgaaaaaggagaaatgtaaaaatggcaggaatggaaacgatacaaagatatagagtagcagactacttaggagttttgggggatgatggacaaaattcctgggtattaatgggagcaggatttaatacattagacgaaaacccatccgcacaaagtgactctaaaacatatataaacgatagaaacagtactagcgctatcaaatcttatcaaacgcaattttcgtttgaaactgatttaattaaaaatgaagaggcgataatggaactttacaaaataggtagagaccaggcaactggcgcagatgctgaaagagattatttaagagtagaattatttttaccaattaaaggcaaagaaaatacttttagggctagaaaatttagagtgtctgttgaagtgagtggatttgctggtgcaggtggagaaactattacagtaagtggaaatttaaataccgttggcgaccttgtacatggagaatttaatactcaaacaagaacttttgtagaagatggagcagaagccccgccagctgaaagtttaaaagttttaactataaattcagttgcaggtactaacacagggaatacaaaaataacagttactccaactcttgaaagtgggaatagctataaatataaaactggggcaaatattacagttccaacacttgatactgattgttcagttgggtacactgcttgggatggtgtagaagaaataacagcaactaagggaaataaaatattaatagtagaagttaatgctaataataaagctaagaaagctggtattactacgattacagtaaaagaataagagggggctaaggaaatgataattaataatatagaattagaagatttagaaatatatgatgctgatgtcatggaaagagttgaaacgtcaataaaaacagctatagacgggatacagattgctgaaacagaggaaaaggaaaatcatgcaatttttagaagaatatgtgatttaatttttgcatgctttgataatatttttggggataatacatcaaataaaatatttgctggaaagcgtaatgtaaaagtttgcatgattgcattttctgaattagctgacgaagtagagagacagaaaaaagaaggcatggagctatttagttctattggtaataagtattcaccaaacagaactcaacgtagagctaaaaaataatgaatatgttagtcgatatacttcccgaaagtgttgaaattgatgggaaagagtataaaattaatacagactttagaatatcaattttgtttgaaatgttaatacaagataattctataagtgacgaggaaaagggggaaaatgcacttcttttatattatcctgtaatccctacaaataccacaatggctatagaaaaaattatttggttttattcatgcgggaaaaaagaaaacaatgtggatgatggttgccgaggtggcgcagggtctagcaaaagtcaaatatattcatatgactatgatgacgagtatatatattcagctttcttgggtcaatatgggattgacttacaggacatagaaaaattgcattggtggaaatttaaagcattgtttaagtctttaaaagaggacaccgaaatagttaaaatcatgggatatagggcaatggatgtaagtggagatatgccaaaggctcaaaaagatttttatagaaaaatgaaaaagatacatgctataccacttcctcaaaacgaggttgaaaaaataaacgaaattgaaaaagcattgctaaatggtggagatattagtaatttattataaaataatatactctacaccttccgaattaatatataattagtatataaatattttaatttgggggggattgttatgggatttaaatttagaaaaagcataaatctaggcggtggattgaagttaaatattaataaaaatagtgtcagtgttagcggtggcgttaaaggtgctagagtttcagttaattctaaagggaaagctacaacaactttaggagtccctggaagtggcttatattaccaggaggtagctaatctaggtggaaataagaagagaaatagtaagagtgtaggaagttcagagagtagtaggcaggctcaacagctattaaaaataataaacgattgtgctaatatagttaatactacaaaagaccctaaaacatttttttatagatataatatgttgttagataagtcatatgccttagttgccatagaggatgatttaaacttttcgggtcaatctcctagtcagatgctagacagcataatagcaaaaaggactgatactataaacgactttttgactagatactacaatgaaatgtctagtaaattgaaagaactgaaaactgaaaaggctcgcatgaacaatgcttataaattctctagcttagcaatagattataaagaacatttaaataatgataacaaagctaagcttaatagactatataaacaactattagatgatgttaaaagacaagattaatatttataaaaagaaaaatataataaaagatttaaataaaaagcacttactttttaaaaaaagtaggtgcttttttaatgcaaatttacaaaaaaaaagggggtggatagatggcagatggttctattattatagatactcttttaaataccgaagacgcagagaaacaacttaataacttagctgataccatgaaaaagaaggcgaaaagcgctttagcggtagctggaattggcgcaagtctaggagctataggaaaacaggctattgacttcggagatgaatatcaaaaagcaatgaatagtttcgagtcagcgacaggaaacgcagaagctaaagcaaaaggctttggagaagcgctacagcaggtttatgcaaataattttggcgaggatatgggcgatataagtgaggtcatgagtttaatatctcaaaagcttgatgggatagatgctagcaatattcaagaggttactgaaagtgctattatgatgagggataccttcgatatggatattggggaaagtttaaatggtgttaactctatgatgcgccagtttggggttagcgcaaaagagtcttataacttgattgcacagggtgcgcaacaagggttaaatcagaatgacgacctcggcgaccaattagcagaatattcgacatattacgcacagatgggtttttcagcagaggaaatgtttaatatgatgaaaaacggggcggagagtggagtctatcaaatagactatttaaatgatgccttgaaagaatttaatattagaacaaaggatggttctaatggtactaaggaagcttttgaggcgctcggttttaatgctgatgaactaactaagaaatttgcgaatggtggaagtagtgcaaaagaagcttttattcaagttacaacagctttgaataacttggatgataatgtattgaaaaatcagataggtgtacaactctttggtactaaatttgaagatttggaagcggacgcagtaacagcgctaacaaatattgaaggaagtataagcagttcaaaagataaattagaagaaattaataagataaaatataatagcttcggagaagcagtaacgggaattggaaggcaaatgcaggttaatttacttcttccaatcgcagaaggattgcttcctgttttaaatgatttagcaaataaatttgctaaggcttttcagaatgagaatactaaaaatgctataagaagtacagcagaaagtattggcgggctaattggaacagttgtaaaattaatatctttagcattaacccctttaatcaatgttataacctttttggttcagcatggtagccttgtagcacccttaatagcaggaattggagttgcttttacaagtcttaaagtagctgggattgtgaggggtatacaaaaaagttttacagatgcccagttggcggtaagaattttcacatctggcgtgactgagtcagaaactaaattgactttgtatcaaatggtagttggattggttaccaaaaaaataagtttggcgcaagttgctaccaatctgtggaaaggagcattaactgcgcttggtggtccagttggcttaactatagttgcggtaactgcattaacggcggtcgttgtttctttatggaaaaataacgaagctttcagagacgcggttataaaaatttggaacaatattaaagacgctggagctaaaatatttggtcagattgctaaattctttacagaaacaataccacaagcactaagtaaggctatatcctttattaaagataattggcaaggattattgctaatgctggttaatccttttgttggagcttttaagctgatttatgataattgcgaaagctttagaaataaagtaaattctatatttaacaaaatcattggtatctttaaaaatgttttaaactttattaaaaacaactggaaaaatataggaagcatgttattaagtccttttgtaaatgcatttaaagctatttataatagttgtgtaaattttaaaaataaggtttttagctttttctctaatgttgtaaaaggcttcgctacttttggaaaaaatataatagttggaataataaacggactttcgagcggtatcggcttggttgtagatactgtaaaaaatatcggtttaattgtagtcaatacatttaaaaaagtgctacgaatacattcaccgtccaaagttacaacagagcttggagagtttgcaggtattggttttgctaatggtataaaaaatacaagcaaagatgtagtagaagcaacaaaagaattaataagcgctatggaaaaaaatctcgataccaataaaagcaaatttgaaaaaatttgcgaggctataacaacagcattaaaaaatcaatacgaaagtcaaaaagatatacaaataaaagcgcttgatgaaagactaaaagttgaggaaaaggcatcaaatgatagattaaaggtctatgaaaaagaatacaatgagaaattaaagtatttagatacagaaacaaatgagaaaactaatgctatacaagaacaaattgacgccatagacaagcaaattgaagaagaacaaaaagcagaagaagagaaagcgtacaatgaaaaaataagcgaccttgacaggaaactagcaacagctaaaaatcaaaaagaacgagaaaaaatacaaaaagaaatatcagaagcacaatcagatagacagaagaaattattagatgaacaaaggcaacaagaaaaaaacagattaaaagaacagattgaaaatataaaaacagaagctagtaacaaaaaagagcagtacaaagaagagtacgacaatcaaaaagaagcagaaagtaaaaaacttgaattgataaaagagtctaatgctagtcaaaaagaagaaattgaaaaatattttagtgaacttttagaagagacaaatattcaaaatgaagcgagaaggctacttttacaaaaaaattcagaagaaattataaaacttttaagtgaatataacccgcattggcaggatgcagggcagagtttagcagatagtttgttaaatggagttaactctaaaaagcaatctatccaggaagctgtaaaggaagctattaacttaaaagagattataccagcacaagaaaaagagcttgatagattgaagaaaaagttagaagaatatgagaaactaaaagaaaaagctaatacttctagcgcaagtggaggggatgtagactcatctgctaaaagttcctctttggattctggttctgccaaactggacgctggagaactagaagaatatgctgatggcatagatgatgttaaaacttctgttgaaggcttagaacttgtcagtgatgaactcgtaacaggaacagtccctaaagttggggattcagctagtaaattatctgaaagtataaaaaaagggttcaatggcattggtggtttttttggtggaatagaaaaatggctaagagatacagacaaaaatataaatgagtggctagctagtgcaaaaaattctattggtgatttcttctctaaagtaaaagataaattcaaagaaggaattgaaaatataggtggattttttggtggtcttggaaataaaataagtgaaggatttgcaggagctggagacttttttacagagtttggagataaggcacagcaaggtttttcaagtataaaagataaagctgtagagattttcggcggtcttagcaattggttcaaagagactgggtcaaaaattggagatgcaattggaagcggattaaaaagtggtttagacttttttactagcacagtaccaaaatggtttgcgggtattggcgacaagataaaagaagaatgtgggaaaataggagaaaaaatatcaagtttctttaatgagacaatgccagctataataaataatattgtcgaatggtttaaacaaattccatataatattggttttgtaatcgggtctattgctggttttttcgttgatttaggagctaatctgtacgcctgggcaacagaaacattaccagaaataataaatagcattgtcgaatggtttgtaagccttccggaaaaaatttcggaattttttagtatcatattgcaaaatattcaaacttggggcgaaaatttcaaggtttctgtttcagagttttttggtgcaatttgggaaaatataacacagttttttacagagctacccgaaagaatttcggaatggtttaatacagtagtagaaacaataagtggctggggcgaaaatttaaagcaattggcaacagatatttttaatcaatttgttgacaatgtattaattccaatttcggagcttccgggaaaattatgggaaaagtttacagatatcatgggaaaagtttcggaatggggttctaatctaattcaaaaagcattagaaacaggaagcaaattcttagaaaatataatgaaattcttttcagaacttccgggcaaaatatgggaaaaattaactaatataatgcaaaaagtcatggagtgggaagttaatttatctaaaaaagctttagaaacagcgaaaaacttttttaacaatatatacaatactgttagccagcttccaggaaaatttagagaatggctagacaatatcatttcaaatgtcataagctgggggactaacttagtcaaacaagctggagaagctggaaaaaatatggcaaatgctgttaaggatgctttgaaagatttgcctagtaaaattatgagtatcgggaaagatgttgtaagaggcttatgggaaggtataacgggcatgggtggctggttaaaagaccaagtccttgattttgctagtaatgttatagatggatttagagacggctttggagtgcattcaccttccataatcatgcgagatttaattggtagaaatcttgtaaaaggggtcggcgttggaatagatgtagaaacgccaggcttgaaagaaaaaatagagaaaaatatatctgaacttacaggtaaattaaaagctacagttaattttgaaacgtctaaaatacaagctaatatagttgcaagtacagattttaaagctggaaaagaaacagctataatgagtaataataaggctgatgaagctaatgaaaatcaagcaggtattaaacttaatatagaaaactttgtaaataatagacaacaagatatagaaaatctttttgatgaaatattgttcttagcaaaaagaaaaggagctttataaaatgttccttttcttttttatatttccttttatcttttttgaaaagactatagtaaaaaatataactacaaaaacggagttatgtctaaaaaataataaatgagaggagggcataaagctatgtttttcgtttataacggtcgagacagcagagaatttggtttaaaaatatacaatataaacgacttatcagctccacagatggaagttgaaagagtgagtgtgccaggcaaagatggagatttactactaaaaaaaggttttgaaaattttacgcttacaatagaatgcgatatagatgcaagacaaagtaatatagaagaagttgcaacagaaataaaaaaatggctacagggcgatatatcatataaaaaactttttttaagtaatagtgacttttattatctagcaagctgtaacaataaactagatataactagaaattttaaaaactttgcatcatgtcttttaacattcgactgctacccttttagatacgcagaagaagaaattataagtttaaatgtattaaatctaaagagtgctactataacaaatttctatagagagtcaaaacctgttctctatatagaaggagcaggggacataagtataaaaataaatactcaaagcatagtgctaagaggggtggcagaaaatggaattttaagcgacttaataatagatagcgaacagatgaatgtatatagaataaacaaagaaaataacattattgtaaatgaaaataataagctttttagtgactttcccatacttgaagaaggagaaaatcagattagctgggaaggggatataaaaagcataaaaataaatcctagatggaatattttataaagttttaaattaaaatttggagggagggattaattattcaaaaaggaaaattagttttatatgaagaaaaagaaacagattttaggcatttaggtttaggtgttcttacgaatgtaataaatgaccatgttagagaggaagaaagcggagttttcgagttagaatttactatctacgaagactcttttttatttaaagaaataaaagtagatagattaattaaagctgatacttcgcccgactacaaagaccagctttttagaatttattatatatcaaaaaatctaggtgggtatattaatgtaaaagcgcaacacattaagtatgatttgcttaataatttcatagaaagtttggaattgaacgatattacttgcgaagaagctttagaaagagtctttcgtgcttgtgaggaacagaacagatttagaggacattcagacatcaaggcaaggaatactattaatattgaaatgcaaagcccttacagcgcaatctgcgagggcgaaaattctctaattcaaaaatttgaaccaactgcgaaacttttctttgataattttaatgttttcttaaattatcaaagaggtgagagtaaaaatgtgctacttgcatataaaaaaaatataacagggcttgaagcggagtatgatacacaagatattgtaacaaaaatatatccttatgcggtctacgaagatgaaatgattacattgacagaaaaatacattgttagtcctaatatgaataaatatgctacccaaaagattgttgctatagattttagttctgatgaggtcagtgttgaagaagaattaagagaaaaatgcaaagactattttaaatacaatcaagttgatttaccaaaagttttatacaaagtcaacttcgtagatttatctacaactataaattataaagattacaaaatgctagaaacagtcaatctaggtgatgaagtgataatacgagattttaatttaaacattaacgcaactgctagagtagttaaaacagactatagcccaataaatcgaaaatactatagtattgaagttggcgatttaataaatcatttagactttttaaataacaagtttaataatatagaaaataaaatagaaacagtaaaaaaagctattgataatgtcaaagtagatgattcagagtttccagacactttaccgaatacaccagctttgacagcagaggggttattcgcttttatcaatctaacatggacatttacaaataagtcttattacaaatatgaagtttatgcgtctcaaattaaagactttgtaccagatacaattaattttacaaatcgaatttttgtagggcaagcaagtgcttacgttcatcaagctgaaccttttcaaacttggtatttcagagtaagagcagtaaactcgcatggaaatgttacagagttctctaatcaagtagaagcacagactacaaaaatcgacgatggaactatgtggatagaaaaaggagcaatagcagatgcattaattggggagttgaagctagatagaggttggtttggacagctaaaaggcatgtatataaatgctagagaaatggtagtcgtaaatgataatggagtcaaaacaatggaaattgatagttttggagatgttcattttaacccaaatacttttaaaattgcttttaatagtgtaagtccttatgttcttattgatgatgaaggattgaaacttataagcgggaagggatttacaaaaatgaccgactcggggctatatacaaaattctacaccggttcagatgtaacagagtcatattatcttcaagaaagtggatacacatactttgattataaagattcaaaaatcataatagacttaccaaaaaaatttgcaggtaaaaattttaaagcaacttgtgcaataaggtctacatcaacaaatggtagctgtttaagttatttcagcacatcagcgacagcaaaaaaaagtgatacaaatccacaattggaactttctgcatctgtgcgaggtgtgtcttacgaaatgtcaggaagccaaacaataggctactggctcggaatgaattttttttcagaaggatttattacagtacaatactatgtttatgcttaaaattttcaaaaaaaaggagaagaagtatggttactattttttacagcaagagaactggagaaatatataattgcataaaatcagagatggagcaggattatacctgctttgcagatagggaagaggattataggcaaatattagataaaatagttgtcgaggatattccagaaattttaaatcctcgtgattataaaattgaaaacggaaaatttgtattaaaggaaaaagaaataataaaagaatttactccaaaaatggtagagtaaaaggagtgataaatttgagagatagaatttatacagtagatattaacactaaaagttaccaagttgcaaaatataagcaatatgataatgcaatagaatttaagattaatttattagaaaataatatagaaaaagatttgacaggatatacagctatagcaaattttcaaagaccagacgggaaaatagtttatcagagctgtactatagaaaattctattgcaacaactataatagaaaataacataacagaagttgcgggggatgtaatagtagagtttactttctacaaagatgatttagttgttactactttttctttaaagattaatatagagaaaagtatagataaaaacagtattacagaagaaccgaaatgggattatatcagcgttacaataaatcaagtaaaagaagtcgtcgaaggcatagaagaaataaaagaaacagaagaagcaagaaaagaagcagaaattaaaagagtcgaagaatttaatagtataaaagaaactttcgactctaaagttacagaagttacagacgctaaaaacagcatgattagtgatgttaatactactaaagatactctaactaaagaagttacagacactaagaatgacttaactaatgttgttactacagctaaagaaagtatgataagtgaagtaactacagttaaagaagaattagaaatcgcagaaggtaaaagggtcgaagaatttaatagtataaaagaaactttcgactctaaagttacagaagttacagacgctaaaaacagcatgattagtgatgttaatactactaaagatactctaactaaagaagttacagacactaagaatgacttaactaatgttgttactacagctaaagaaagtatgataagtgaagtaactacagttaaagaagaattagaaatcgcagaaggtaaaagggtcgaagaatttaatagtataaaagaaactttcgactctaaagttacagaagttacagacgctaaaaacagcatgattagtgatgttaatactactaaaacaacattaatagacgaagttaacacagttaaagcggaagttacaacagctaaaaatactatgattagcgaagtaactacagctaaagaaactatgcagacagaagttacagacgctattaatgcaatccccacaaaagaagagttaaaaggggtaggaatagaaataaaaggaagtttagataatatatcagcacttccagtcaatccaactttaagtgatgcttactttgtaaaaagcgcaacaatagaaaaccaaattgatttatatgtttgggacaacactaattgggtcaaagttcctgacataaaaataaagggtgaaaatggagatggcttagaatttaattgggatggcacgcgactaggtataaggatagaaggacaggagaattatacttatacagatttaaaaggtcaaaaaggcgataaaggtgatagtattgaatttaattggaatggcacacgattaggtataaagatagaaggtcaagaaaattatagttatacagaattgaaaggggagcagggttatactccaacaataggagaaaatggaaactggtggattaataatatagatacccaaaaaccagctagaggggcatctttgaggattttaggaaaattagattctatagataacttaccattagaccctactatcggagattgctggattatagggagaaatatttatatatatcaaactaaatgggaagacttaggttctctagcgggcgtggacggcaagaacctagaatttaattgggatggcacacagttaggcgttaggcaacaatacgaattagattataagtatatagacctcaaaggtgacaatatcgaatttgcatgggatggcacacgactaggtgtaaggatagaaggacaggagaattatacttatacagatttgaaaggtcaaaaaggcgatagcattgaatttagttgggatggtacggagctaggcgttagaatagaaggtcaagaggactatagctatacaaatctaaaaggagcgacaggaaataaattagaatttaattggaatggaagtcagctaggtattagagaagaaggacaaacggaatatatatatacagagcttagaggggaacaaggttatactccagcaatcggcgaaaacggtaattggtttataaatggagaagacacggggaaagcgtcaaaaggaaaagttacatggaatgagttattagaaaaaccgaaagagttagattacattaaaaaaagcacgacttttaattcagacggctctataacagatattttagactcggttagtaaaactataactaaatttaatgcagatgggactatagtagacgaaaaatatatagataatgtattagtaagtaaagtaaaaacgacttttaaaggtaatcaaatagaagaaataaaagaagaggtgagttaatgagttgggcggagacatacaaagtgaatagtgacttgcaaggcgagccactaaattttttaagttatttgcaagacataaaactaaatggattagatagttatgtgctgtttattggaaatgctaggatatgggaagaattatatttaaatagtttatatttattttctgatagaggaataagagaaacagtttacacagctttttcagaaactgatattgataatttatttaataaaagcactaagctaggggaacaattaaatgccttttatagaacagatatatttagcttaggaaatgctgataatgtagtaaaagaaatgactatagagcattataattcattagaggaaaaatttaaagcagggtatgatagatatgttacaagagaacaagaaaagtcaactataggagcatggtttaattctacttttagcttagataatactgatttagaaaatcttacaactatagaagaaatattagcaaatgtggaagctactaatgcaatacttaataatagtaatgcaatagtagctttaactatgtgtaaatcaagcatggacgcagttgtagcaagttcaaatgctatggatttattaggtcaatatattttaagagttacaacagagtcaccagtcattagagcaattttaaaaaataatgtgattagggatgcgattataaatagtgatgaagctatgacacaaatttcaagtaacgaaaactccgtaatggaaatatttaatgacttagaagctacaaaagtattagtgcaaaaccaaaatagcataaataaaatattaactaataatgttactgttgaaaaaataatccctaatttattagaaatgaagtataatttacaaacttctttaaattatataaatacaataaaatcaaatattgcttctggtaaaggtcaaattatggcaataacttataatgaagaaatattcccgattttaaaaaatgcagtaaaaaattatgatggtatggaaaccacacgtaatatatcacaacgagatattgaggaaaaaataaaaatttcggatgcaattttagaaagttcaatcgcaatggcaacttttgcaaataattctattatagtaaataaagttggtgaccgagtgggaattatagaaagtattttcagtaaaacagtgtcattaaatgcttttatgaaaagtacaacagctataaatattttagtaaataaaactactgcttttactaagatagcaaataactctactgctttcaatgctatgctcactatttcagaaaataacgttactattgcaaataatacaacagcaatgggcataattgcaaataacgcacaagctatgtcgacagttgcaaataacgatacgtctataagtgtttttgtaaataatacaacagcaatgggcataattgcaaatagctcaacggctatgaccaaaataacacttacaggacttgcacttaacagaatggttaaaagtaatacagctaaaagcatattaattagcaaaaattcaactttacaaacttacaaaaataatatacagaacacaatacaaggaagtactgcttattttagaactatcacaggctttgcggatgctgatgataacccaccgcaaactattaatagtacttatgtaggcataacttattgttatggatataaaggtaatagttattatggaattgtgtatcatggctacaatacaagtatagaagcaggcagaggaaatggctataaagatgaaaccaaaaagtttataacattaggcggggctagatatgaccaaagcggagacggttattttacttacgcaatgtatcaagcaatttaatgtttataagtcatctaaaagattagattaatagtctaatctttttttatataaaaaataaataatcaaaattaggaggaaagttatggaagaattaataacacaactaagtggactaggagcagtagggatattatgcgctttgctgttcaaaaacactatgcaggagaaaaaagaagatagagatatgtataaaaaaacagtagaaaatttcatagaactatctacacagcaacaagagataaataagaatatacttgttgaaatgggagcaatgaaaacggacgtagaagaaatcaaagaagatgtaacagacataaaagacatgttacagaaagaaggtctttaaatgagagtagcactaacagcagggcatacgctaacaggaaaaggaacaggagcaacagggtatataaatgaaggaacagaaaataggatattgatggatttggttgttaaatggcttaaaaagggtggggctactgtgtatagtggtaaggtagataagtctaataactacttagcagagcaatgtcaaatagccaataagcaaaatgtagatgtagctgtacaaatacattttaacgctgaccatacgacattaaatgtcatgggtacagagacgatatataaaactaataatggtaaggtatatgccgaaagagtcaacgagaaactagcaacaatatttaaaaatagaggcgcaaaatcggacgcaagaggtctttactggcttagtcatacaaaagctccagcgatattaatagaagtgtgtttcgtagatagtaaagcagatacagactattatattagacataaagacatagtcgctaagttaatagcagaaggtattttaaataagacaatagataataaagaaaatagtgaggataagaaaatgtataaacatacaatcgtttatgatggagaagttgacaaaatccccgcaactgtagttggctggggctataatgatggtaaaatattaatatgtgatataaaagattatgtaccaggtcagacacaaaatctttatgttgttgggggtggagcatgtgaaaagattggttctatgactaaagaaaaatttactatgataaagggtaatgataggtttgatacactttacaaggcactagattttattgatagatagattagaaggtagcaactagagttagttgttaccttcttttttttatgtctacttttctttcttcttccaaacaacttcgtatcctatcagattagcaatagtcaagatttcactatacttcatagtctcattatttattttttgtcttaaattctctactgtattattcttattattatattcattcattaaattatttaactcattcatgctgatattttctttcacaagaatacttttgatttcatttttccatgtcattttttcacacctctcttatttatataataacataaaaaaattaaaagtaaaagaataatctatgttaatcaaagttatatttttggaaatcaaagaaaaaactttgaaaaagtgttgacttagatattcatatagattataatataattaacaaataaaacaagggggtaagcaaagaatgaaaactttatttaaagaagcacataaaatagcaagagaaattaaagaaaaatataatgatgtagattataaagtacaatttagtctttgcttatccttcttaaataaaaagggggatataaaaatgaaagaattaaaagggtcagaaaaacaaattatttgggctaatgatataagaacagacattttaaatttaactaacgaactagaaaaaagtaaaatagaaagaataaaaaatgaagactacaaaatcaaagatatgagtatagaagaaatgacagaaagatgtaaaagaaaatttgaaagaataagagaagcaataagcaacatagaggatgctaagttctttatagataattttagaaatgttttaaaatataattctttaaatcaaaaagcgtttcaaataaaccagatttttcgagagtctcaatttacagaagaaattggaaatttaaaatttttaaaaggagaaactcaagcgtctcataaacttagaaaagttgaaggtagtataagctatgaagaagctaaaaaaatagctaaagaaataaattttaatgataattggtctaatgaaataaaagaaaatgtacttgaaatagttgaaatatttgacgacgcagtaaaacaagctactagcacagaatatatagagaaagctaaaaaatacataatagaaacattaatacaaaaaaatgcacaattttataaaaatggatttgcagacattaaaaagaagcagattgaaaactatagaaaaatagaaagtgctgaaagaaaaatagaaattgcataccaaatatttagagatggtgtagagtgttaaaaattttggattggtacaaatatagttcaccgtcgaatgctataattttaatatataaaataaatggaggattgaagtatgaatatagattttagtacaatattaaatttaaaagttaataaagagaatgttgaaatgatagaaaaagagattaataaaatcaacaatgatatatttgatataagtcttaaagattgtgcaaacagtcacgtgggaatcgttaaagaaacagttggaaaaagtttaaacattgaaacgtgggggcatggtgaaattaacagtagcataggaataagattgagatttaatttttattattcaaaaggcgacaaagtagacatagaaaatatagaaaacattttaatatatgtaaatagcttatgcagcaaaaatgtagaaagtgaccttatagctagtgtaagacctggattttataaattagaagagaaatattctacacgcgttgaaaaatgcgaaattagacacgaatttacaggcataaacaaacaagaaattaaagaatttttagagtatcttacagaaattgaaaagagcgaaagaactgttatgtataaaaacaactaaaaaatggaggatataaaaaatgaataaacaaaaagctagaagatttttaagagttatagatatgaatatagataaaatagaggaagaagctataaaagcttttaaagaaagttgtttaatcaaagagactaataatataaaaatttatatcgatatacaaggaaaagttgaagcgatagcagttcaaacttgggctaaacttttaggtgatgacaaagaaattaatattttcacattaaatcaagcgccaactcatttaaacgatatgcttggagaaatttgttacgtaaacgattatgaagaatttgaaaattggtgtgaaaatgagtgggaaaatttggattgggatagttataaaaaattcaataaagaaaatttcgaagaaattgctgaaagaaatatagacgatagcacatcagtttttttagaagaattacaaaaaggcattgaaagttgtaaacaagaattgcaaaatgtaattgaaaattaagtagaagagtattattattaatgtatatagtatcgcttttaagattaactacgagggatttaaaatattttttaatttatttagaaataatattgtaataagaattttaagattaactatgagggatttaaatgtcaatttaatttatatagaaataatataatatccaattttagattaactatgcggaaataaaaacagtgtattcaataaatacactgttttttaatgtttagttattatgataacttaatccttcgattataaatcctacattcgttgtcatctctaattcgttacttaacattattccttgtgtaaattcattgtcagctggcaatgttactctttttctagcaattgcttctataattgtttgaaatagtttaattttcatatcattatcatgtccagcgaatcgtagataattcgttacttcttgcgaaaacttattcaactccgatttagtcattttttcagataactcttttccaatttgcagataaacgttcatcttttccaacccctttttagattatagttaaaacatattatttaaacaatattaatatattgtaataataatattaaaatattacttaaatattatatatacaatatttaagtaatatctaaacaatataaatataatattatttactttttcttagtcttatttcttctatttctctcattgtatatatttaaattctcttcttttatagtgacatcagataaaatttgagttagtatatcacttaataatttactaacgtcgctgttcatatcaatagaaaaagattttaatttgtttacaagctcctcatcaagcgttgcactcatagtcacttttttacttttcttattaactagattatatatgtttaatgtcttattgtctgtagttgtagaatcattttgtacgattgttccatttttcaaaatcggtttttctttatcaactaaaaggtctctgttgaaacttggcatctataacactccttttcttttcaattcttctaacatattagtaaattcctgtctgctgaaatgctctttagttatttttgtataatctgttagagatagtttttttaatagtgccttctctataaactcattttttctaatgtatgtatctaacataatatctctcatatcgttaaacccttccagataagaatcgaaagtatcgctaatttgagttttcttcttctcaaatccaactaaaatagtactttttatattatcctccttatcaaaataggttctatcaacatcccagagttgtttaaataattctgctcctcttaaagaagaaatgtttttatcttgaattggaataattatactatctgctaagaaaagcacatttttagctgtcaaatcgtagcgtggagataaatcacagataatataatcatactcactcaaagtattaaagttttgcatgtaccagcgagctaaaaatttttctctggctggtaaaggtgatagctcttgttcaaatctagccatttgtatgtcagaaggaattaagtctacattaatgtaattttcattaggtgacttgactattgcatcattagcactaatcccttttaaaatatctaatgtagtattatcattatgatttatttcataaacatattgtgttagatttgcttgcacatctaagtcccataagagtatttttttatctttatctttcgcaagttcatacgctgtcattatagacgttgttgtcttatagatacctccttttatgttaaagtacgtaagtagctttgtattagccattttctccacctcattattatatttataatattataataatattgtagtattgtttttataatattgcaacaatatattaatattgttaattacaatattcaaataatataaatacaatatttacatattgcttttacaataccaatatattatattaaaaatactaaaatattgtatatacaatactaaaataatatttttataatattacagtaatatttttatattatagtaaaatttaaaaaaaagaaggctaagaaaaaaagcaaccttcttttatagaaaaagtcattcattcttagccttttcaattattatcctgtcgccctcgaatgttgccgtaacattagggttttctcttgttatgcccatttcatcagcccattttttaggaacactcattctaggagtaaacgacccactcccacctttgtgaaagttaaactttaaatctcttttttctttttccattcattagctccttttttgctgtattacaaagaaaagcaataatacaacactaaaaactaaaccgagcatgttgcttgtactagagtttaatactatagatactatatttaagactatagttatcaaaactaaaacaatgcaaatcttataaaatttatcactcatgtttttttagaaatgtgttataatattagaaagaagtcacctagagagaagggctattccctctaggcttatccttacagttctttcaaaattcttagaactgcgaggattatgttaagtaataataggatgaaggagaaaacttttttaactatgttaaatttgttttctcttttctttttacttctttctaatctccccattcccgttcctcctttcttttatttttttgctttctcacctccttctctataaatatattataccatgacgggtcgtcaaaaacaatagttttctcctattttttaaacaaattttggtaaaaagtaaagattttagtatattagaaatgatgtaaaattgtatctttttttaaaaaatgtgatataataaaagcaaggaaataatgatttactttacacaagagtagctatttccaatgttttgaaaaataacttattttcttaaaccactcttattggcgtttgagtggttttttaattttatcgttcttaaaataaactttgataaaaataaaaaaaatagaatactgaaaatgatgtaaagttgtatcttttaaagaaaatgtgatataataaaagcaagagaactgtattctagtcataagagtagagttttagtctaaaataaaaaattatttaaactttttgaatttgattctcaaatcaaattcccaacca
